(19) United States
(12) Patent Application Publication
(10) Pub. No.: US 2025/0011816 A1
(43) Pub. Date: Jan. 9, 2025

(54) FEL D 1 KNOCKOUTS AND ASSOCIATED COMPOSITIONS AND METHODS BASED ON CRISPR-CAS9 GENOMIC EDITING

(71) Applicant: Indoor Biotechnologies Inc., Charlottesville, VA (US)

(72) Inventors: Martin D. Chapman, Charlottesville, VA (US); Olya Spassibojko, Marlboro, NJ (US)

(21) Appl. No.: 18/680,548

(22) Filed: May 31, 2024

Related U.S. Application Data
(63) Continuation of application No. 16/082,157, filed on Sep. 4, 2018, now Pat. No. 12,037,601.
(60) Provisional application No. 62/303,686, filed on Mar. 4, 2016.

(51) Int. Cl. C12N 15/90; A01K 67/0276; C12N 15/11

(52) U.S. Cl. CPC C12N 15/907; A01K 67/0276; C12N 15/11; A01K 2217/075; A01K 2227/10; A01K 2267/02; C12N 2310/20; C12N 2800/80

(57) ABSTRACT

Compositions and methods for genetically modifying felines or feline cells are described. The compositions and methods are useful for knocking out all or a portion of a Fel d 1 gene from a feline genome. Feline cells and organisms in which all or a portion of the Fel d 1 gene is knocked out are also described. The compositions and methods may include reagents and procedures for CRISPR-Cas9-mediated genomic editing of Fel d 1.

### CROSS-REFERENCE TO RELATED APPLICATIONS

[0001] This application is a continuation application of U.S. patent application Ser. No. 16/082,157 filed Sep. 4, 2018. The '157 application is a National Stage application under 35 USC § 371 of International Application No. PCT/US17/20609, filed Mar. 3, 2017, which application relies on the disclosure of and claims priority to and the benefit of the filing date of U.S. Provisional Application No. 62/303,686, filed Mar. 4, 2016, the disclosures of each of which are hereby incorporated by reference herein in their entireties.

### SEQUENCE LISTING

[0002] The instant application contains a Sequence Listing which has been submitted electronically in XML file format and is hereby incorporated by reference in its entirety. Said XML copy, created on Apr. 25, 2024, is named WR-IB-101-CON_SL.xml and is 2,188,101 bytes in size.

### BACKGROUND OF THE INVENTION

### Field of the Invention

[0003] The present invention generally relates to compositions and methods for genetically modifying felines or feline cells. More particularly, the present invention relates to compositions and methods for knocking out all or a portion of a Fel d 1 gene from a feline genome, as well as feline cells and organisms in which all or a portion of the Fel d 1 gene is knocked out.

### Description of Related Art

[0004] Allergy and asthma have become increasingly prevalent in modern society. Common allergens come from a variety of different sources, ranging from dust mites to foods. Household pets are another typical source of allergens, and some (e.g. cat and dog) are commonly found in homes without pets. However, household pets play a significant role in people's daily lives, providing company and comfort to a variety of individuals of all ages and backgrounds, many of whom are allergic to their pets but could not bear to give them up. Cat allergens, in particular, are a common health concern for numerous patients, and the allergens are essentially ubiquitous in society. Particles of cat allergens readily become airborne and remain for hours, and the allergen also sticks to surfaces such as fabrics, resulting in its transmission from a cat-owning household to the rest of the world. Significant levels of cat allergens can be found in offices, stores, or schools, regardless of whether a cat has been present in that environment, due to such high transmission rates of the allergens.

[0005] Allergy to cats affects 10-15% of adults and 1 out of 7 children between the ages of 6-19. Symptoms of patients suffering from cat allergy may range from rhinoconjunctivitis to severe asthma. Though multiple cat allergens have been identified, up to 95% of patients have IgE antibodies specific to the major allergen from cat, Fel d 1. Fel d 1 is recognized by 60-90% of an allergic individual's total IgE antibodies.

[0006] Fel d 1 is a protein of the secretoglobin family and exists as a tetramer that is 35 kD in molecular weight. The tetrameric protein is composed of two heterodimers, each of which consists of two antiparallel chains linked by three disulfide bonds, each encoded by a different gene. See Grönlund et al., Formation of Disulfide Bonds and Homodimers of the Major Cat Allergen Fel d 1 Equivalent to the Natural Allergen by Expression in Escherichia coli, J. Biol. Chem., Vol. 278, No. 41, pp. 40144-40141 (Oct. 10, 2003). The gene encoding chain 1 (for which the protein product is 70 amino acids (8 kD)) and chain 2 (92 amino acids (10 kD)) are arranged symmetrically in the feline genome, starting in a narrow region and extending outwards, encoded by opposite strands of the DNA (see Grönlund et al., The Major Cat Allergen, Fel d 1, in Diagnosis and Therapy, Int Arch Allergy Immunol (2010), 151:265-274 and Morgenstern, et al., Amino acid sequence of Fel d 1, the major allergen of the domestic cat: Protein sequence analysis and cDNA cloning, Proc Natl Acad Sci USA, 88 (21): 9690-9694 (1991). The two genes are located in a genomic span of less than 10,000 base pairs.

[0007] Analysis of sequence and structural homology suggests that Fel d 1 is most closely related to Androgen-Binding Proteins (especially those of the mouse and yak) and other uteroglobin allergens (such as those produced by bats and rabbits). The Fel d 1 protein binds Ca²⁺ ions, and based on its structure, also contains two internal cavities that could bind steroid ligands. Additionally, it has been hypothesized that Fel d 1 may play a role in protecting the epithelium or have anti-inflammatory properties. However, despite years of studying Fel d 1, the biological function of the Fel d 1 protein remains unknown.

[0008] In the cat, Fel d 1 is produced by the sebaceous glands of the skin, as well as by the salivary, perianal, and lachrymal glands. Fel d 1 is transferred to the fur from saliva, through grooming, and from skin. Kittens are known to produce less Fel d 1 than adult cats, and females produce lower levels of Fel d 1 compared to males. Neutered cats also produce significantly less Fel d 1 than unaltered cats. When dried Fel d 1 particles on dander and cat hair become airborne, they can remain airborne for hours. Humans come in contact with Fel d 1 either by inhalation of these particles, or through direct contact with a cat. The immune system response to Fel d 1 is IgE-antibody mediated. When the Fel d 1 protein binds to receptors on immune cells, it results in the release of pro-inflammatory agents including cytokines and histamines, which stimulate the allergy symptoms. There is also evidence that Fel d 1 has gelatin-and fibronectin-degrading activity and, like other uteroglobins, is an inhibitor to the activity of phospholipase A2, but these additional properties have not been directly linked to the immune response.

[0009] Attempts to mitigate the amount of Fel d 1 present in the environment of cat-allergic patients have included limiting cats' access to bedrooms, frequent vacuuming or steam cleaning, and even regular cat washing. Additionally, the use of High-Efficiency Particulate Air (HEPA) filters has been shown to decrease the amount of airborne allergen present in the environment. Still, these methods cannot completely eliminate Fel d 1, and symptoms of severely allergic patients may persist, often for a long time after the cat has been in the environment due to trace amounts of allergen remaining.

[0010] Some individuals allergic to cats opt to search for animals specifically tested and proven to produce lower levels of Fel d 1, but selective breeding can only reduce an animal's allergens by so much, and perhaps not enough for severely allergic patients. Further, animals selectively bred for low allergen levels are extremely time-consuming and costly to produce. Additionally, extensive in-breeding of animal lineages can result in increased coincidence of rare genetic mutations, and consequently, severe genetic disease. So, while the practice of selective breeding may be practical in the short-term, it is unsustainable as a long-term solution to generating hypoallergenic animals.

[0011] Related efforts in this area include those described in U.S. Patent Application Publication Nos. 2003/0177512 and 2011/0023156, each incorporated by reference in their entireties. Yet, there remains a need in the art for improved methods and compositions that address these issues.

### SUMMARY OF THE INVENTION

[0012] The present invention provides compositions and methods for selective deletion of one or more Fel d 1 genes in a cell of a cat, such as a domestic house cat (Felis catus). The one or more Fel d 1 genes may include chain 1, chain 2, or both chain 1 and chain 2.

[0013] In embodiments, the present invention provides compositions and methods for targeting a Fel d 1 genomic sequence in a cat cell. In one aspect of this embodiment, the invention provides a plurality of polynucleotide sequences that can be used in a CRISPR-Cas9 system to target Fel d 1 for genome editing. The polynucleotides may include any sgRNA that may have utility in a CRISPR-Cas9 system for targeted deletion of Fel d 1 or a portion thereof from the genome of a cat cell.

[0014] Embodiments of the invention provide a chimeric guide RNA (sgRNA) comprising a first polynucleotide and a second polynucleotide. The first polynucleotide is a crRNA. The second polynucleotide is a tracrRNA. The crRNA (first polynucleotide) is selected such that it is capable of binding to a portion of one strand of DNA located in a target DNA region. The complement of that strand is referred to herein as the sgRNA Target Sequence, which is identical in sequence to the crRNA. The sgRNA Target Sequence may also be referred to herein as the crRNA target sequence since it is the crRNA portion of the sgRNA that directs the sgRNA to the target DNA site. As used herein, “identical in sequence” means that the crRNA has the same sequence as the sgRNA Target Sequence, but that the crRNA contains uracil (U) in place of thymine (T). The sgRNA Target Sequence is a portion of a Fel d 1 genomic sequence or a flanking region, wherein the portion is 5′ of a PAM sequence consisting of NGG, wherein N=A, T, C, or G.

[0015] In embodiments, the first polynucleotide of the sgRNA (crRNA) is identical in sequence to a portion of Fel d 1 chain 1 genomic sequence or 3′ flanking region 1 kb in length or a portion of Fel d 1 chain 2 or a 5′ flanking region 1 kb in length.

[0016] In embodiments, the first polynucleotide of the sgRNA (crRNA) is identical in sequence to a portion of the sequence set forth in SEQ ID NO: 1226 or SEQ ID NO: 1227, or is substantially complementary to a portion of the sequence set forth in SEQ ID NO: 1226 or SEQ ID NO: 1227.

[0017] In embodiments, the first polynucleotide of the sgRNA (crRNA) is 18-22 nucleotides in length, such as 18, 19, 20, 21, or 22 nucleotides in length.

[0018] In embodiments, the first polynucleotide of the sgRNA (crRNA) is identical in sequence to a DNA sequence set forth in SEQ ID NOS: 1-1225 (exemplary sgRNA Target Sequences).

[0019] In embodiments, the first polynucleotide of the sgRNA is a crRNA that is at least 60%, 65%, 70%, 75%, 80%, 85%, 90%, 95%, 96%, 97%, 98%, or 99% identical in sequence to a DNA sequence set forth in SEQ ID NOS: 1-1225.

[0020] In embodiments, the first polynucleotide of the sgRNA (crRNA) is located 5′ of the second polynucleotide of the sgRNA (tracrRNA).

[0021] Embodiments of the invention include a chimeric DNA molecule encoding any chimeric guide RNA described herein.

[0022] In embodiments, the chimeric DNA molecule comprises a first polynucleotide and a second polynucleotide. The first polynucleotide of the chimeric DNA molecule is identical to a portion of a Fel d 1 genomic sequence or a flanking region, wherein the portion is 5′ of a PAM sequence consisting of NGG, wherein N=A, T, C, or G. The second polynucleotide encodes a tracrRNA.

[0023] In embodiments, the first polynucleotide of the chimeric DNA molecule is identical to a portion of Fel d 1 chain 1 genomic sequence or 3′ flanking region 1 kb in length or a portion of Fel d 1 chain 2 or a 5′ flanking region 1 kb in length.

[0024] In embodiments, the first polynucleotide of the chimeric DNA molecule is identical to a portion of the sequence set forth in SEQ ID NO: 1226 or SEQ ID NO: 1227, or is substantially complementary to a portion of the sequence set forth in SEQ ID NO: 1226 or SEQ ID NO: 1227.

[0025] In embodiments, the first polynucleotide of the chimeric DNA molecule is identical to a DNA sequence set forth in SEQ ID NOS: 1-1225.

[0026] In embodiments, the first polynucleotide of the chimeric DNA molecule is at least 60%, 65%, 70%, 75%, 80%, 85%, 90%, 95%, 96%, 97%, 98%, or 99% identical to a DNA sequence set forth in SEQ ID NOS: 1-1225.

[0027] In embodiments, the second polynucleotide of the chimeric DNA molecule comprises a sequence set forth in SEQ ID NOS: 1228-1233 or a fragment thereof, and the second polynucleotide of the sgRNA (tracrRNA) is selected to be identical in sequence to a DNA sequence set forth in SEQ ID NOS: 1228-1233 or a fragment thereof.

[0028] Embodiments of the invention include an expression construct comprising any chimeric DNA molecule described herein, operably linked to a promoter. The promoter may be a Pol III promoter such as a U6 promoter.

[0029] Embodiments of the invention include recombinant vectors comprising any expression construct described herein.

[0030] Additionally, recombinant vectors of the invention may include a second expression construct comprising a polynucleotide encoding Cas9 operably linked to a promoter. The promoter of the second expression construct may be a constitutive mammalian promoter, an inducible promoter, or a tissue-specific promoter.

[0031] Embodiments of the invention include host cells comprising any recombinant vector described herein. In embodiments, the host cells lack expression of Fel d 1 protein or a portion thereof, and/or lack all or a portion of the genomic sequence which encodes Fel d 1 protein. In some embodiments, the host cell produces a hypoallergenic variant of Fel d 1 protein.

[0032] Embodiments of the invention include a cell line derived from any host cell described herein. In some aspects of the invention, the cell line is immortalized.

[0033] Embodiments of the invention include a method of deleting all or a portion of a Fel d 1 genomic sequence from a feline cell. The method comprises introducing at least a first and second chimeric guide RNA and a Cas9 protein into a feline cell. Each chimeric guide RNA comprises a first polynucleotide and a second polynucleotide such that the first polynucleotide is a unique crRNA that is selected to be identical in sequence to a portion of a Fel d 1 genomic sequence that is selected as an sgRNA target sequence and the second polynucleotide is a tracrRNA. The first chimeric guide RNA and second chimeric guide RNA direct the Cas9 protein to produce a first and second double stranded break in a portion of Fel d 1 genomic sequence or a flanking region such that upon repair of the first and second double stranded breaks, an intervening portion comprising a Fel d 1 genomic sequence is removed from the genome of the feline cell.

[0034] In embodiments, the crRNA of the first chimeric guide RNA is identical in sequence to a portion of a Fel d 1 genomic sequence that is located 5′ of Fel d 1 chain 2 genomic sequence and the crRNA of the second chimeric guide RNA is identical in sequence to a Fel d 1 genomic sequence that is located 3′ of Fel d 1 chain 1.

[0035] In embodiments, the crRNA of the first chimeric guide RNA is identical in sequence to a portion of a Fel d 1 genomic sequence that is located internal to a portion of a Fel d 1 chain 2 genomic sequence and the crRNA of the second chimeric guide RNA is identical in sequence to a Fel d 1 genomic sequence that is located internal to Fel d 1 chain 1 genomic sequence.

[0036] In embodiments, the crRNA of the first chimeric guide RNA is identical in sequence to a portion of a Fel d 1 genomic sequence that is located 5′ of Fel d 1 chain 2 genomic sequence and the crRNA of the second chimeric guide RNA is identical in sequence to a portion of a Fel d 1 genomic sequence that is located internal to Fel d 1 chain 1 genomic sequence.

[0037] In embodiments, the crRNA of the first chimeric guide RNA is identical in sequence to a portion of a Fel d 1 genomic sequence that is located internal to Fel d 1 chain 2 genomic sequence and the crRNA of the second chimeric guide RNA is identical in sequence to a portion of a Fel d 1 genomic sequence that is located 3′ of Fel d 1 chain 1 genomic sequence.

[0038] In embodiments, the portion of the Fel d 1 genomic sequences are chosen from the DNA sequences set forth in SEQ ID NOS: 1-1225.

[0039] Additional embodiments include a method of deleting all or a portion of a Fel d 1 genomic sequence from a cell. The method comprises introducing a first and second pair of chimeric guide RNAs (sgRNAs) and a Cas9 nickase into a feline cell. Each chimeric guide RNA comprises a first polynucleotide and a second polynucleotide such that the first polynucleotide is a unique crRNA identical in sequence to a portion of a Fel d 1 genomic sequence selected as an sgRNA target sequence and the second polynucleotide is a tracrRNA. The first pair of chimeric guide RNAs direct the Cas9 nickase to produce a first pair of single stranded breaks in a first portion of Fel d 1 genomic sequence or a flanking region and the second pair of chimeric guide RNAs direct the Cas9 nickase to produce a second pair of single stranded breaks in a second portion of Fel d 1 genomic sequence or a flanking region such that upon repair of the first and second pair of single stranded breaks, an intervening portion comprising a Fel d 1 genomic sequence is removed from the genome of the feline cell.

[0040] In embodiments, the first pair of chimeric guide RNAs are selected to be capable of base pairing with a genomic sequence that is located 5′ of Fel d 1 chain 2 genomic sequence and the second pair of chimeric guide RNAs are selected to be capable of base pairing with a genomic sequence that is located 3′ of Fel d 1 chain 1 genomic sequence.

[0041] In embodiments, the first pair of chimeric guide RNAs are selected to be capable of base pairing with a genomic sequence that is located internal to Fel d 1 chain 2 genomic sequence and the second pair of chimeric guide RNAs are selected to be capable of base pairing with a genomic sequence that is located internal to Fel d 1 chain 1 genomic sequence.

[0042] In embodiments, the first pair of chimeric guide RNAs are selected to be capable of base pairing with a genomic sequence that is located 5′ of Fel d 1 chain 2 genomic sequence and the second pair of chimeric guide RNAs are selected to be capable of base pairing with a genomic sequence that is located internal to Fel d 1 chain 1 genomic sequence.

[0043] In embodiments, the first pair of chimeric guide RNAs are selected to be capable of base pairing with a genomic sequence that is located internal to Fel d 1 chain 2 genomic sequence and the second pair of chimeric guide RNAs are selected to be capable of base pairing with a genomic sequence that is located 3′ of Fel d 1 chain 1 genomic sequence.

[0044] In embodiments, the portion of the Fel d 1 genomic sequence selected as the sgRNA Target Sequence is chosen from the DNA sequences set forth in SEQ ID NOS: 1-1225. In embodiments, the sgRNA Target Sequence is the complement of the portion of the Fel d 1 genomic sequence that the chimeric guide RNAs are selected to be capable of base pairing with.

[0045] In embodiments of the methods described herein, chimeric guide RNAs and Cas9 protein are introduced directly into the cell as ribonucleoprotein complexes.

[0046] In embodiments of the methods described herein, chimeric guide RNAs and Cas9 protein are introduced indirectly into the cell by way of one or more expression cassettes.

[0047] In embodiments, the first and second chimeric guide RNAs and Cas9 protein are introduced indirectly into the cell by way of one or more vectors.

[0048] Embodiments include a method of treating a cat, such as administering a recombinant vector to a cat that is wild-type for Fel d 1 expression. The recombinant vector encodes at least a first and second chimeric guide RNA and a Cas9 protein. Each chimeric guide RNA (sgRNA) comprises a first polynucleotide and a second polynucleotide such that the first polynucleotide is a unique crRNA that is selected to be encoded by a portion of a Fel d 1 genomic sequence selected as an sgRNA target sequence and the second polynucleotide is a tracrRNA. The first chimeric guide RNA and second chimeric guide RNA direct the Cas9 protein to produce a first and second double stranded break in a portion of Fel d 1 genomic sequence or a flanking region such that upon repair of the first and second double stranded breaks, an intervening portion comprising a Fel d 1 genomic sequence is removed from the genome.

[0049] In embodiments, the recombinant vector is a viral vector such as a lentiviral vector. Further, in embodiments, the recombinant vector comprises a tissue-specific or inducible promoter driving Cas9 expression.

[0050] Further, the recombinant vector can be administered systemically, or to specific tissues such as salivary gland or skin tissue.

[0051] Further, in embodiments of methods of the invention, Fel d 1 protein expression is impaired or absent in skin, salivary glands, perianal glands, or lachrymal glands.

[0052] Additional embodiments of the invention include methods of producing a cat in which Fel d 1 expression is impaired or absent.

[0053] In one embodiment, the method comprises culturing any of the cell lines or host cells described herein, placing a single engineered cell or host cell into an enucleated ovum to create a cloned embryo, implanting the cloned embryo into a recipient female cat, and allowing the cloned embryo to mature into a cat.

[0054] In another embodiment, the method comprises culturing a cat oocyte, introducing into the cat oocyte a pair of guide RNAs and the Cas9 protein, wherein the guide RNAs are designed to be encoded by a Fel d 1 genomic sequence of a 5′ or 3′ flanking region, fertilizing the oocyte with cat sperm to create an embryo, culturing the embryo in vitro, implanting the embryo into a recipient female cat, and allowing the embryo to mature into a cat.

[0055] Additional embodiments include transgenic or knock-out cats produced according to any method described herein.

[0056] An embodiment of the invention includes a cat lacking a portion of a Fel d 1 genomic sequence which results in impaired or absent expression of Fel d 1 protein. In embodiments, the Fel d 1 protein or a portion thereof is expressed but is hypoallergenic in humans.

[0057] In some embodiments, all or a portion of the Fel d 1 genomic sequence is deleted from somatic cells. In some embodiments, all or a portion of the Fel d 1 genomic sequence is deleted from germline cells. In some embodiments, all or a portion of the Fel d 1 genomic sequence is deleted from both somatic cells and germline cells. In some embodiments, at least 0.01, 0.02, 0.03, 0.04, 0.05, 0.06, 0.07, 0.08, 0.09, 0.1, 0.2, 0.3, 0.4, 0.5, 0.6, 0.7, 0.8, 0.9, 1, 2, 3, 4, 5, 6, 7, 8, 9, 10, 11, 12, 13, 14, 15, 16, 17, 18, 19, 20, 21, 22, 23, 24, 25, 26, 27, 28, 29, 30, 31, 32, 33, 34, 35, 36, 37, 38, 39, 40, 41, 42, 43, 44, 45, 46, 47, 48, or 49 kb of a Fel d 1 genomic sequence, including 5′ and or 3′ flanking regions, is deleted.

[0058] Another embodiment of the invention includes F1 progeny of a male and female cat embodiment described herein.

### BRIEF DESCRIPTION OF THE DRAWINGS

[0059] The accompanying drawings illustrate certain aspects of embodiments of the present invention and should not be used to limit the invention. Together with the written description the drawings serve to explain certain principles of the invention.

[0060] FIG. 1 is a genomic map of Felis catus Fel d genomic region, chains 1 and 2.

[0061] FIG. 2A is a genomic map of Felis catus Fel d 1 chain 1.

[0062] FIG. 2B is a genomic map of Felis catus Fel d 1 chain 2.

[0063] FIG. 3 is a genomic map of Felis catus Fel d genomic region, chains 1 and 2, showing exemplary sgRNA target regions.

[0064] FIG. 4A is an outline of a strategy for designing sgRNAs for use with Cas9 according to an embodiment of the invention.

[0065] FIG. 4B is an outline of a strategy for designing sgRNAs for use with Cas9 nickase according to an embodiment of the invention.

[0066] FIG. 5A is a schematic diagram of a guide RNA expression cassette according to an embodiment of the invention.

[0067] FIG. 5B is a schematic diagram of a Cas9 expression cassette according to an embodiment of the invention.

[0068] FIG. 6A is a schematic diagram of a vector comprising a cloning site for insertion of an oligonucleotide encoding a crRNA upstream of a polynucleotide encoding a tracrRNA according to an embodiment of the invention.

[0069] FIG. 6B is a schematic diagram of the vector of FIG. 6A with a crRNA cloned into the vector according to an embodiment of the invention.

[0070] FIG. 7 is a schematic diagram of a vector comprising a Cas9 expression cassette according to an embodiment of the invention.

[0071] FIG. 8A is a schematic diagram of a vector comprising two guide RNA expression cassettes according to an embodiment of the invention.

[0072] FIG. 8B is a schematic diagram of a vector comprising up to 8 guide RNA expression cassettes according to an embodiment of the invention.

[0073] FIG. 9A is a schematic diagram of a vector comprising a guide RNA expression cassette and a Cas9 expression cassette according to embodiments of the invention.

[0074] FIG. 9B is a schematic diagram of a vector comprising a two guide RNA expression cassettes and a Cas9 expression cassette according to embodiments of the invention.

### DETAILED DESCRIPTION OF VARIOUS EMBODIMENTS OF THE INVENTION

[0075] Reference will now be made in detail to various exemplary embodiments of the invention. It is to be understood that the following discussion of exemplary embodiments is not intended as a limitation on the invention. Rather, the following discussion is provided to give the reader a more detailed understanding of certain aspects and features of the invention.

[0076] The present invention provides compositions and methods for selective deletion of genomic DNA encoding one or more Fel d 1 genes in cat cells and ultimately in a living cat. The composition and methods are useful for precise genomic engineering to selectively eliminate production of Fel d 1, resulting in a domestic cat that no longer produces this key allergen.

[0077] Embodiments of methodologies of the present invention include those based on CRISPR-Cas9 mediated gene editing, which is known in the art (see Cong et al., Multiplex Genome Engineering Using CRISPR/Cas Systems, Science 15 Feb. 2013: 339 (6121), 819-823 “Cong et al., 2013”; Ran et al., Genome engineering using the CRISPR-Cas9 system, Nat Protoc. 2013 Nov. 8 (11): 2281-2308 (“Ran et al., 2013”); Doudna J A and Charpentier E, The new frontier of genome engineering with CRISPR-Cas9, Science, 2014, 346:6213, 1258096-1-9; and Jinek et al., A Programmable Dual-RNA-Guided DNA Endonuclease in Adaptive Bacterial Immunity, Science 337, 816 (2012) (“Jinek, 2012”)). Briefly, CRISPR is an RNA-guided genomic editing system that employs a bacterially derived protein (Cas9) and a synthetic guide RNA to introduce a double strand break at a specific location within the genome. By transfecting a cell with the Cas9 protein along with a specially designed guide RNA (gRNA, or sgRNA) that directs the cut through hybridization with its matching genomic sequence, site-specific cleavage of genomic DNA can be introduced into a cell. Upon repair of the double-strand break by the cell's DNA repair systems, errors can be introduced to generate a knockout of a particular gene. Additionally, an engineered Cas9 protein (Cas9 “nickase”) functions similarly except it introduces single-stranded breaks instead of double-stranded breaks.

[0078] The details of the backbone vectors, other reagents for SpCas9 genome engineering system, and protocols can be found in the Cong and Ran publications referenced above, as well as the website for Dr. Feng Zhang at the Broad Institute (http://www.genome-engineering.org/crispr/). Features of the system such as the amino acid sequence of Streptococcus pyogenes Cas9 (for example, see public Accession No. Q99ZW2 (NCBI)) and sequence of the tracrRNA (see Jinek, 2012) are publicly available. Exemplary DNA sequences encoding Streptococcus pyogenes tracrRNA or fragments thereof are set forth in SEQ ID NOS: 1228-1233. Reagents, cloning vectors, and kits for guide RNA and Cas9 expression and associated assays are available from commercial vendors such as GenScript, BioRad, Thermo-Fisher, Sigma-Aldrich, OriGene, and Clontech. Additionally, CRISPR plasmids (including those from the Zhang lab) have been deposited at and are available from Addgene (Cambridge, MA), a non-profit plasmid repository, and a number of protocols and resources are available on the Addgene website (http://www.addgene.org/crispr/).

[0079] In addition, background information on CRISPR-mediated gene editing can be found in U.S. Pat. Nos. 8,697,359; 8,795,965; 8,865,406; 8,871,445; 8,889,356; 8,889,418; 8,906,616; 8,932,814; 8,945,839; 8,993,233; 8,999,641 as well as U.S. Patent Application Publication Nos. 2014/0068797; 2014/0170753; 2014/0179006; 2014/0179770; 2014/0186843; 2014/0186919; 2014/0186958; 2014/0189896; 2014/0227787; 2014/0234972; 2014/0242664; 2014/0242699; 2014/0242700; 2014/0248702; 2014/0256046; 2014/0273231; 2014/0273232; 2014/0273234; 2014/0287938; 2014/0310830; 2014/0335620; 2014/0357530; 2015/0020223; 2015/0031134; 2015/0079681; 2015/0184139; 2015/0203872; 2015/0232882; 2015/0232883; 2015/0247150; 2015/0291965; 2015/0291966; 2015/0356239; the disclosures of these patents and published applications are hereby incorporated by reference herein in their entireties.

[0080] The terms “polynucleotide”, “nucleotide”, “nucleotide sequence”, “nucleic acid” and “oligonucleotide” are used interchangeably. They refer to a polymeric form of nucleotides of any length, either deoxyribonucleotides or ribonucleotides, or analogs thereof. Polynucleotides may have any three dimensional structure, and may perform any function, known or unknown. The following are non-limiting examples of polynucleotides: coding or non-coding regions of a gene or gene fragment, loci (locus) defined from linkage analysis, exons, introns, messenger RNA (mRNA), transfer RNA, ribosomal RNA, short interfering RNA (siRNA), short-hairpin RNA (shRNA), micro-RNA (miRNA), ribozymes, cDNA, recombinant polynucleotides, branched polynucleotides, plasmids, vectors, isolated DNA of any sequence, isolated RNA of any sequence, nucleic acid probes, and primers. A polynucleotide may comprise one or more modified nucleotides, such as methylated nucleotides and nucleotide analogs. If present, modifications to the nucleotide structure may be imparted before or after assembly of the polymer. The sequence of nucleotides may be interrupted by non-nucleotide components. A polynucleotide may be further modified after polymerization, such as by conjugation with a labeling component.

[0081] In aspects of the invention the terms “guide RNA”, “single guide RNA”, “synthetic guide RNA”, “sgRNA”, and “chimeric guide RNA” are used interchangeably and refer to a chimeric polynucleotide sequence comprising a “guide sequence” and a “tracr sequence”.

[0082] The term “guide sequence” may be used interchangeably with the terms “guide” or “CRISPR-targeting RNA” or “crRNA”. In general, the guide sequence refers to the polynucleotide sequence within the guide RNA that is selected to hybridize with a corresponding DNA molecule at a specific location and is capable of directing sequence-specific binding of a CRISPR complex at that target location within the DNA molecule. In some embodiments, the degree of complementarity between a guide sequence and the corresponding sequence to which it will bind, when optimally aligned using a suitable alignment algorithm, is about or more than about 50%, 60%, 75%, 80%, 85%, 90%, 95%, 97.5%, 99%, or more. In some embodiments, a guide sequence is about or more than about 5, 10, 11, 12, 13, 14, 15, 16, 17, 18, 19, 20, 21, 22, 23, 24, 25, 26, 27, 28, 29, 30, 35, 40, 45, 50, 75, or more nucleotides in length. In some embodiments, a guide sequence is less than about 75, 50, 45, 40, 35, 30, 25, 20, 15, 12, or fewer nucleotides in length. In some embodiments, the guide sequence is about 5 to 40, 10 to 30, 15 to 25, 16 to 24, 17 to 23, 18 to 22, or 19 to 21, or 20 nucleotides in length. Preferably, the guide sequence is 18-22 nucleotides in length. The ability of a guide sequence to direct sequence-specific binding of a CRISPR complex at a target DNA location may be assessed by any suitable assay.

[0083] The term “tracrRNA” or “tracr sequence” refers to a portion of the guide RNA that acts as a scaffold between the crRNA and Cas9 endonuclease. Exemplary polynucleotides encoding tracrRNA are set forth in SEQ ID NOS: 1228-1233. Thus, suitable tracrRNA have a polynucleotide sequence that is identical in sequence to the polynucleotides in SEQ ID NOS: 1228-1233 or a fragment thereof. In some embodiments, the tracrRNA, or polynucleotides encoding tracrRNA may be about 50, 55, 60, 65, 70, 75, 80, 85, 90, 95, or 100 nucleotides in length.

[0084] The term “CRISPR” refers to Clustered Regularly Interspaced Short Palindromic Repeats, a series of short direct repeats in the genome of select bacteria and archaea that are interspaced with short spacer sequences of plasmid or viral origins.

[0085] The terms “CRISPR complex” and “CRISPR-Cas” refer to a specific system of adaptive immunity in select bacteria and archaea mediated by RNA and nucleases which enable the organisms to respond to and eliminate invading genetic material.

[0086] The term “Cas9” or “Cas9 endonuclease” (also known as COG3513, Csx12, Cas5, or Csn1) refers to a CRISPR-associated protein with two nuclease domains that uses a crRNA: tracrRNA duplex for site-specific double-stranded cleavage of DNA. In aspects of the invention, the terms may refer to a wild-type Cas9 protein, or any variant, including mutants, homologs, orthologs, that mediate RNA-guided double-stranded or single-stranded cleavage of DNA.

[0087] The term “Cas9 nickase” refers to a Cas9 endonuclease that is engineered so that one of its nuclease domains is non-functional so that its activity is limited to single-stranded cleavage of DNA.

[0088] The term “target sequence” refers to a specific region of DNA (such as a genomic DNA sequence) that is the target of a guide RNA. A DNA strand within this region hybridizes with the crRNA portion of the guide RNA. The sgRNA Target Sequence is a polynucleotide sequence located in this target DNA region. In embodiments, the crRNA is selected to hybridize (otherwise referred to as binding or base pairing) with the polynucleotide sequence that is the complement of the sgRNA Target Sequence.

[0089] As used herein the term “wild type” is a term of the art understood by skilled persons and means the typical form of an organism, strain, gene or characteristic as it occurs in nature as distinguished from mutant or variant forms.

[0090] As used herein the term “variant” should be taken to mean the exhibition of qualities that have a pattern that deviates from what occurs in nature. “Variant” DNA molecules are DNA molecules containing minor changes in a native sequence, i.e., changes in which one or more nucleotides of a native sequence is deleted, added, and/or substituted. Variant DNA molecules can be produced, for example, by standard DNA mutagenesis techniques or by chemically synthesizing the variant DNA molecule or a portion thereof. Such variants preferably do not change the reading frame of the protein-coding region of the polynucleotide and can encode a protein having no change, a reduction, or an increase in a desired biological activity. “Variant” peptides or proteins are those which include changes in the amino acid sequence include substitutions, deletions, and/or insertions.

[0091] The terms “non-naturally occurring” or “engineered” or “genetically-engineered” are used interchangeably and indicate the involvement of the hand of man. The terms, when referring to nucleic acid molecules or polypeptides mean that the nucleic acid molecule or the polypeptide is at least substantially free from at least one other component with which they are naturally associated in nature and as found in nature.

[0092] “Complementarity” refers to the ability of a nucleic acid to form hydrogen bond(s) with another nucleic acid sequence by either traditional Watson-Crick base pairing or other non-traditional types. A percent complementarity indicates the percentage of residues in a nucleic acid molecule which can form hydrogen bonds (e.g., Watson-Crick base pairing) with a second nucleic acid sequence (e.g., 5, 6, 7, 8, 9, 10 out of 10 being 50%, 60%, 70%, 80%, 90%, and 100% complementary). “Perfectly complementary” means that all the contiguous residues of a nucleic acid sequence will hydrogen bond with the same number of contiguous residues in a second nucleic acid sequence. “Substantially complementary” as used herein refers to a degree of complementarity that is at least 60%, 65%, 70%, 75%, 80%, 85%, 90%, 95%, 97%, 98%, 99%, or 100% over a region of 8, 9, 10, 11, 12, 13, 14, 15, 16, 17, 18, 19, 20, 21, 22, 23, 24, 25, 30, 35, 40, 45, 50, or more nucleotides, or refers to two nucleic acids that hybridize under stringent conditions.

[0093] As used herein, “stringent conditions” for hybridization refer to conditions under which a nucleic acid having complementarity to a target sequence predominantly hybridizes with the target sequence, and substantially does not hybridize to non-target sequences. Stringent conditions are generally sequence-dependent, and vary depending on a number of factors. In general, the longer the sequence, the higher the temperature at which the sequence specifically hybridizes to its target sequence. Non-limiting examples of stringent conditions are described in detail in Tijssen (1993), Laboratory Techniques In Biochemistry And Molecular Biology-Hybridization With Nucleic Acid Probes Part I, Second Chapter “Overview of principles of hybridization and the strategy of nucleic acid probe assay”, Elsevier, N.Y.

[0094] “Hybridization” refers to a reaction in which one or more polynucleotides react to form a complex that is stabilized via hydrogen bonding between the bases of the nucleotide residues. The hydrogen bonding may occur by Watson Crick base pairing, Hoogstein binding, or in any other sequence specific manner. The complex may comprise two strands forming a duplex structure, three or more strands forming a multi stranded complex, a single self-hybridizing strand, or any combination of these. A hybridization reaction may constitute a step in a more extensive process, such as the initiation of PCR, or the cleavage of a polynucleotide by an enzyme. A sequence capable of hybridizing with a given sequence is referred to as the “complement” of the given sequence.

[0095] As used herein, “expression” refers to the process by which a polynucleotide is transcribed from a DNA template (such as into and mRNA or other RNA transcript) and/or the process by which a transcribed mRNA is subsequently translated into peptides, polypeptides, or proteins. Transcripts and encoded polypeptides may be collectively referred to as “gene product.” If the polynucleotide is derived from genomic DNA, expression may include splicing of the mRNA in a eukaryotic cell.

[0096] A “gene,” as used herein, refers to a DNA region (including exons and introns) encoding a gene product, as well as all DNA regions which regulate the production of the gene product, whether or not such regulatory sequences are adjacent to coding and/or transcribed sequences. Accordingly, a gene includes, but is not necessarily limited to, promoter sequences, terminators, translational regulatory sequences such as ribosome binding sites and internal ribosome entry sites, enhancers, silencers, insulators, boundary elements, replication origins, matrix attachment sites, and locus control regions. According to certain aspects, any portion of the Fel d 1 gene which results in disruption of Fel d 1 protein synthesis may be targeted by the compositions and methods of the invention. As understood herein, a “Fel d 1 gene” can be used interchangeably with a “Fel d 1 genomic sequence”.

[0097] The terms “polypeptide”, “peptide” and “protein” are used interchangeably herein to refer to polymers of amino acids of any length. The polymer may be linear or branched, it may comprise modified amino acids, and it may be interrupted by non-amino acids. The terms also encompass an amino acid polymer that has been modified; for example, disulfide bond formation, glycosylation, lipidation, acetylation, phosphorylation, or any other manipulation, such as conjugation with a labeling component. As used herein the term “amino acid” includes natural and/or unnatural or synthetic amino acids, including glycine and both the D or L optical isomers, and amino acid analogs and peptidomimetics.

[0098] As used herein, “identity” is a measure of the identity of nucleotide sequences or amino acid sequences compared to a reference nucleotide or amino acid sequence. In general, the sequences are aligned so that the highest order match is obtained. “Identity” per se has an art-recognized meaning and can be calculated using published techniques. (Sec, e.g., Computational Molecular Biology, Lesk, A. M., ed., Oxford University Press, New York (1988); Biocomputing: Informatics And Genome Projects, Smith, D. W., ed., Academic Press, New York (1993); Computer Analysis of Sequence Data, Part I, Griffin, A. M., and Griffin, H. G., eds., Humana Press, New Jersey (1994); von Heinje, G., Sequence Analysis In Molecular Biology, Academic Press (1987); and Sequence Analysis Primer, Gribskov, M. and Devereux, J., eds., M Stockton Press, New York (1991)). While there exists several methods to measure identity between two polynucleotide or polypeptide sequences, the term “identity” is well known to skilled artisans (Carillo, H. & Lipton, D., Siam J Applied Math 48:1073 (1988)). Methods commonly employed to determine identity or similarity between two sequences include, but are not limited to, those disclosed in Guide to Huge Computers, Martin J. Bishop, ed., Academic Press, San Diego (1994) and Carillo, H. & Lipton, D., Siam Applied Math 48:1073 (1988). Computer programs may also contain methods and algorithms that calculate identity and similarity. Examples of computer program methods to determine identity and similarity between two sequences include, but are not limited to, GCG program package (Devereux, J., et al., Nucleic Acids Research 12 (i): 387 (1984)), BLASTP, ExPASy, BLASTN, FASTA (Atschul, S. F., et al., J Molec Biol 215:403 (1990)) and FASTDB. Examples of methods to determine identity and similarity are discussed in Michaels, G. and Garian, R., Current Protocols in Protein Science, Vol 1, John Wiley & Sons, Inc. (2000), which is incorporated by reference. In one embodiment of the present invention, the algorithm used to determine identity between two or more polypeptides is BLASTP.

[0099] As used herein, a sequence is “substantially identical” if it at least 60%, 65%, 70%, 75%, 80%, 85%, 90%, 95%, 97%, 98%, 99%, or 100% identical to a reference sequence.

[0100] “Operably Linked.” A first nucleic-acid sequence is “operably linked” with a second nucleic-acid sequence when the first nucleic-acid sequence is placed in a functional relationship with the second nucleic-acid sequence. For instance, a promoter is operably linked to a coding sequence if the promoter affects the transcription or expression of the coding sequence. Generally, operably linked DNA sequences are contiguous and, where necessary to join two protein coding regions, in reading frame.

[0101] A cell, tissue, organ, or organism into which has been introduced a foreign polynucleotide, such as a recombinant vector, is considered “transformed”, “transfected”, or “transgenic.” A “transgenic” or “transformed” cell or organism also includes progeny of the cell or organism.

[0102] As used herein, “knockout” refers to a cell or organism in which a gene product is eliminated or any procedure resulting in such elimination. In certain aspects of the invention, a “knockout” can result from insertions, deletions, substitutions, frameshift mutations, and the like, that result from the compositions and methods described herein. As used herein, “knockout” may also refer to a genetically-engineered cell or organism in which a portion of DNA (such as genomic DNA) is removed. The term “knockout” as it refers to a gene is intended to mean removal or all or a portion of the DNA associated with that gene. In certain aspects, the compositions and methods of the invention have utility for knocking out all or a portion of a Fel d 1 gene.

[0103] As used herein, “hypoallergenic” means designed to reduce or minimize the possibility of an allergic response. In certain aspects of the invention, a hypoallergenic cat may result from “knockout” of the cat allergen Fel d 1. However, this invention contemplates that the compositions and methods may produce Fel d 1 hypoallergenicity through a variety of mechanisms, including any change in Fel d 1 two-dimensional or three-dimensional structure that results in reduced IgE reactivity.

[0104] Compositions of the invention include one or more guide RNAs and one or more DNA sequences encoding guide RNAs that may direct site-specific cleavage of a Fel d 1 genomic sequence, or any flanking portion that is 5′ or 3′ of the Fel d 1 genomic sequence. By identifying appropriate target sequences in the cat genome, guide RNAs or DNA sequences encoding guide RNAs may be identified. Candidate guide RNA target sequences may be identified from published genomic data or by isolating genomic DNA from a feline tissue or cell sample and sequencing the genomic DNA. In an embodiment, SEQ ID NOS: 1-1225 represent 1225 candidate target sequences in the cat genome which may be the site of site-specific double stranded cleavage of a Fel d 1 genomic sequence or any adjacent 5′ or 3′ flanking region. The candidate target sequences may be identified in silico through one or more algorithms implemented by a computer processor, or manually.

[0105] Methods of the invention include, in embodiments, screening guide RNAs for efficacy in initiating genomic editing of Fel d 1 through in vitro techniques, which may include high-throughput screening. Upon identification of guide RNAs having efficacy in vitro, active guide RNAs can be introduced into a host cell, and the engineered host cell can be used as a basis for cloning a cat that lacks expression of the Fel d 1 protein.

[0106] Methods of the invention include cloning using engineered host cells as donor cells in cloning by nuclear transfer. For example, feline skin cells or adult fibroblast cells can be cultured and transfected with vectors encoding guide RNAs and Cas9. Upon confirmation of knock-out of Fel d 1, a single donor cell is placed into enucleated ova. Cloned embryos are cultured and then surgically transferred to a surrogate queen. Additionally, this invention contemplates additional methods of creating Fel d 1 knockout cells or animals, such as through direct gamete genetic modification, or manipulation of embryonic stem cells. Alternatively, viral vectors encoding guide RNAs and Cas9 can be administered to wild-type cats to excise Fel d 1 genomic sequences in vivo. The vectors can be administered systemically or to specific Fel d 1 expressing tissues.

[0107] Also included in embodiments of the invention are transgenic cats that are knockouts for Fel d 1 (or a portion thereof) as a result of method of the invention. The cats have reduced expression of Fel d 1 or a portion thereof, and may be hypoallergenic or non-allergenic for Fel d 1. The cats have Fel d 1 knocked out in somatic cells and in the germline and are thus able to pass this characteristic to progeny.

[0108] As an alternative to CRISPR-Cas9 genomic editing, the present invention contemplates the use of other methods of genomic editing, knockdown, or silencing known in the art, including knockout by homologous recombination, knockout by Cre-lox system, or knockdown by RNA interference. For example, homologous recombination involves design of a disruption construct, deletion of the Fel d 1 gene in embryonic stem cells, injection of the engineered stem cells into an embryo, implantation of embryos, screening for kittens (heterozygous Fel d 1 Δ), and breeding of heterozygotes to obtain homozygotes. Genetic engineering through a Cre-lox system involves homologous recombination to insert lox sites around an exon or full Fel d 1 gene, and then transfection and expression of Cre recombinase (see Metzger, D. & Feil, R. Engineering the mouse genome by site-specific recombination. Curr. Opin. Biotechnol. 10, 470-476). RNA interference involves introduction of siRNA to target the native cellular machinery to prevent translation or induce degradation of specific mRNAs. These techniques are known in the art and have been reviewed (see Lodish, Molecular Cell Biology, W.H. Freeman and Company, New York). Additionally, embodiments of the invention contemplate inducible knockouts, tissue-specific knockouts, genome editing using zinc finger nucleases (see U.S. Patent Application Publication No. 2011/0023156), and Cas9 variations such as epigenetic silencing (dCas9 fused to a DNA methyltransferase).

### Example: Culture of Cell Lines

[0109] Felis catus cell lines can be obtained from American Type Culture Collection (ATCC; Manassas, Virginia) and cultured according to protocols known the art, including the ATCC® Animal Cell Culture Guide available on the ATCC website. Examples of cell lines that may be available include CRFK (ATCC® CCL-94™), Fcwf-4 [Fcwf] (ATCC® CRL-2787™), FC77.T (ATCC®) CRL-6105_FL™), PG-4 (S+L−) (ATCC® CRL-2032™), MYA-1 (ATCC® CRL-2417™), FIB [FIB(N)] (ATCC® CRL-6168™), G355-5 (ATCC® CRL-2033™), Fc2Lu (ATCC® CCL-217™), FC114E.Tr (ATCC®) CRL-6167™), FC47 (ATCC®) CRL-6094™), FeT-J (ATCC® CRL-11967™), F25 (ATCC® CRL-6566™), Fc3Tg (ATCC® CCL-176™), FeLV-3281 (ATCC®) CRL-9116™), FC83.Res (ATCC® CRL-6567™), AK-D (ATCC® CCL-150™), FC2.K (ATCC® CRL-6126™), FL74-UCD-1 (ATCC® CRL-8012™), FcT-1C (ATCC® CRL-11968™).

### Example: Primary Cell Culture

[0110] Primary cell lines may be established from tissue samples or biopsies of cat tissue. Examples include bone marrow biopsies, endoscopic biopsies, skin puncture biopsies and needle biopsy procedures including fine needle aspiration, core needle biopsies, vacuum-assisted biopsies, and image-guided biopsies. These would be performed according to standard protocols used when taking a biopsy for pathology, except a portion of the tissue sample would either be immediately put in culture or cryopreserved with the use of a cryoprotectant, such as DMSO or glycerol, for later culturing. Thus, the biopsy procedures need not be elaborated here.

[0111] The cells from the portion of the biopsy may be cultured through a variety of methods known for tissue culture and primary cell culture. For example, for primary cell culture, the tissue sample may be first dissected to remove fatty and necrotic cells. Then, the tissue sample may be subject to enzymatic or mechanical disaggregation. The dispersed cells may then be incubated, and the media changed to remove loose debris and unattached cells. Because primary cells are anchorage-dependent, adherent cells, they require a surface in order to grow properly in vitro. In one embodiment, the cells are cultured in two-dimensional (2D) cultures. Typically, a plastic uncoated vessel such as a flask or petri dish is used, and the cells are bathed in a complete cell culture media, composed of a basal medium supplemented with appropriate growth factors and cytokines. During establishment of primary cultures, it may be useful to include an antibiotic in the growth medium to inhibit contamination introduced from the host tissue. Various protocols for culturing primary cells are known and a variety of resources are available, including the ATCC® Primary Cell Culture Guide, available on the American Type Culture Collection website.

### Example: Extraction of Genomic DNA

[0112] Genomic DNA can be isolated from tissue culture cells according to various protocols known in the art. For example, in one example of such a procedure, Felis catus cells are cultured in a monolayer are trypsinized and counted. The cells are pelleted by centrifuging 5 minutes at 500×g at 4 degrees, washed in ice cold PBS and re-pelleted. The cells are resuspended in 1 volume of digestion buffer (1 ml digestion buffer/10⁸ cells. Samples are incubated at 50° C. for 12-18 hours while rotating, extracted with phenol/chloroform/isoamyl alcohol, and centrifuged 10 minutes at 1700×g. The aqueous layer is transferred to a new tube, and ½ volume of 7.5 M ammonium acetate and 2 volumes of 100% ethanol may be added. The DNA is pelleted by spinning 2 minutes at 1700×g and washed with 70% ethanol; the ethanol is then decanted and allowed to air dry. The DNA is resuspended at 1 mg/ml in TE buffer. If necessary, the sample is shaken gently at room temperature to 65° C. to facilitate resuspension (˜1 g mammalian cells yields 2 mg DNA). 10% SDS is added to a final concentration of 0.1% and RNAse A to a final concentration of 1 μg/mL. The sample is incubated for 1 hour at 37° C. The sample is then phenol/chloroform extracted and ethanol precipitated.

[0113] Digestion Buffer:
[0114] 100 mM NaCl
[0115] 10 mM Tris [pH 8.0]
[0116] 25 mM EDTA [pH 8.0]
[0117] 0.5% SDS
[0118] 0.1 mg/mL proteinase K

### Example: Sequencing

[0119] Genomic DNA isolated from a direct biopsy sample, cryopreserved biopsy sample, or a cultured cell sample can be subject to sequencing analysis. Various sequencing approaches are known, including Sanger (or dideoxy) method, Maxam-Gilbert, Primer Walking, and Shotgun Sequencing. Preferred are next-generation sequencing methods (also known as high-throughput sequencing), which include a number of different sequencing methods including Illumina (Solexa) sequencing, Roche 454 sequencing, Ion torrent: Proton/PGM sequencing, and SOLID sequencing. Such next-generation techniques have been reviewed in the literature (see Grada and Weinbrecht, Next-Generation Sequencing: Methodology and Application Journal of Investigative Dermatology (2013) 133, e11; and Bahassi and Stambrook, Next-generation sequencing technologies: breaking the sound barrier of human genetics, Mutagenesis, 2014 September; 29(5):303-10). Next generation sequence methods may encompass whole genome, whole exome, and partial genome or exome sequencing methods. Whole exome sequencing covers the protein-coding regions of the genome, which represents just over 1% of the genome.

### Example: Design of Guide Sequences

[0120] In embodiments, a guide sequence of the invention is selected to target one or more Fel d 1 genomic sequences. The guide sequence may target a chain 1 or chain 2 genomic sequences on either strand of genomic DNA, or any region that is 5′ or 3′ of chain 1 or chain 2. In preferred embodiments, at least one pair of guide RNAs is chosen to excise a portion of genomic DNA between the pair.

[0121] Additionally, embodiments of the invention contemplate selection of guide RNA sequences to target flanking regions of Fel d 1 sequences and/or target internal regions of Fel d 1 sequences, or both. Thus, the guide RNAs may be selected to target one or more exons, or may be selected to completely excise Fel d 1 genomic DNA. For example, in one embodiment, genomic DNA encoding one or more exons of chain 1, chain 2, or both, is targeted. In another embodiment, exon 1 of chain 1 is targeted. In another embodiment, exon 2 of chain 1 is targeted. In another embodiment, exon 3 of chain 1 is targeted. In another embodiment, exon 1 of chain 2 is targeted. In another embodiment, exon 2 of chain 2 is targeted. In another embodiment, exon 3 of chain 2is targeted. In another embodiment, multiple exons of chain 1, chain 2, or both chain 1 and chain 2 are targeted. In another embodiment, a region that is 5′ or 3′ flanking of chain 1 or chain 2 is targeted. In another embodiment, two flanking regions of Fel d 1 genes (e.g. one upstream of chain 2, another downstream of chain 1) are targeted. In embodiments of the invention, 5′ or 3′ flanking regions that are 0.1, 0.2, 0.3, 0.4, 0.5, 0.6, 0.7, 0.8, 0.9, 1, 1.5, 2, 2.5, 3, 3.5, 4, 4.5, 5, 5.5, 6, 6.5, 7, 7.5, 8, 8.5, 9, 9.5, or 10 kb or more in length are targeted. In another embodiment, two internal regions of Fel d 1 genes (e.g. one internal to chain 2, one internal to chain 1) are targeted. The guide RNAs may be selected to target one or more exons, or may be selected to completely excise Fel d 1 genomic DNA. In another embodiment, a guide RNA is selected to target and inactivate a regulatory element such as the promotor of a Fel d 1 genomic sequence.

[0122] Embodiments of the invention further contemplate selection of guide sequences based on predicted “on-target” activity. The guide sequences are selected to bind to one or more target sequences with minimal potential for “off-target” activity. Thus, the guide sequences should be designed to match the target sequence with minimal homology to other regions of the genome.

[0123] Additional embodiments of the invention contemplate selection of guide sequence through identification of Promoter Adjacent Motif (PAM) sequences in the genomic region to be targeted. The PAM sequences are short sequences recognized by the CRISPR complex and may vary depending on the species of Cas9. In one embodiment, the PAM sequence is specific to a S. pyogenes Cas9 and consists of the sequence NGG, wherein N is any nucleotide. The target sequences are chosen to be upstream (or 5′) of the PAM sequence.

[0124] For example, in one embodiment of a method for designing a guide sequences a PAM (NGG) sequence is identified in a Fel d 1 genomic sequence or a region flanking 5′ or 3′ of the genomic sequence. Then, a specified number of nucleotides is counted upstream (or 5′) of the PAM sequence to determine the 5′ start of the actual guide RNA sequence. In one embodiment, the start of the target sequence is 20 nucleotides upstream of the PAM sequence. Additional considerations that may increase efficacy at target sequences include a G at position 1 (from the 5′ end of the sequence) and an A or T at position 17. Additionally, it is preferred that conserved regions of Fel d 1 genomic sequence are targeted. Finally, the actual guide sequence is determined by selecting an RNA sequence that is complementary to the target sequence.

[0125] In one embodiment, the guide sequences are designed from Fel d 1 genomic sequences available in the literature or in GenBank (such as the Felis catus isolate Cinnamon breed Abyssinian chromosome E2, whole genome shotgun sequence, public Accession Number CM001392; see also Pontius, J. U., Initial sequence and comparative analysis of the cat genome, Genome Res. 17 (11), 1675-1689 (2007)). In another embodiment, the guide sequences are designed from sequencing data from one or more feline cell lines. The feline cell lines may be primary cell cultures, including those available commercially or those established from feline tissue samples.

[0126] For example, FIG. 1 show a map of a 49.4 kilobase region of the Felis catus genome that comprises chain 1 and chain 2 coding regions. FIGS. 2A and 2B show a close-up map of chain 1 and chain 2 coding regions, respectively. The maps of FIGS. 1, 2A, and 2B show various features such as exons.

[0127] FIG. 3 shows the map of FIG. 1 with specific target regions for guide RNAs (or more particularly, the crRNA portion of the sgRNAs). In this case, eight crRNA target sites are listed (“A” representing a target site for one strand of DNA and “B” representing a corresponding target site on the complementary strand). The table below shows the relative location of the (crRNA) target sites.

TABLE 1
Exemplary crRNA Target Sites and Location

| crRNA Target Site | Location |
|---|---|
| crRNA 1A, 1B | 5′ of chain 2 |
| crRNA 2A, 2B | 3′ of chain 1 |
| crRNA 3A, 3B | internal to chain 2 |
| crRNA 4A, 4B | internal to chain 1 |

[0128] Additionally, the following table shows exemplary strategies for designing pairs of guide RNAs and in particular for selecting target portions of the Fel d 1 genomic region.

TABLE 2
Exemplary Strategies for Two-Site
Cleavage of Fel d 1 Genomic DNA

| 1^{st} site | 2^{nd} site |
|---|---|
| 5′ of chain 2 | 3′ of chain 1 |
| internal to chain 2 | internal to chain 1 |
| 5′ of chain 2 | internal to chain 1 |
| internal to chain 2 | 3′ of chain 1 |

[0129] Strategies which target as large a portion of the Fel d 1 genes as possible are preferred. For example, removing a portion of the Fel d 1 gene(s) that would in turn eliminate any potential allergic response is highly desired. One particular strategy could include choosing crRNA target sequence(s) toward the outside of the Fel d 1 region, whether the entire region is deleted or the beginning portion of the region is deleted. Thus, preferred embodiments include target sites that are 5′ and 3′ of the entire Fel d 1 genomic region, but removing any portion of the genomic region that would result in a reduced or eliminated allergic response is also possible. As an alternative strategy, beginning portions of chain 1 and chain 2 can be targeted so that neither chain is expressed.

[0130] Accordingly, pairs of crRNAs can be chosen according to the above strategy to target specific sites, such as according to the following table:

TABLE 3
Exemplary crRNA Target Sites for Cas9

| 1^{st} site | 2^{nd} site |
|---|---|
| 1A | 2B |
| 1B | 2A |
| 1A | 2A |
| 1B | 2B |
| 3A | 4B |
| 3B | 4A |
| 3A | 4A |
| 3B | 4B |
| 1A | 4B |
| 1B | 4A |
| 1A | 4A |
| 1B | 4B |
| 3A | 2B |
| 3B | 2A |
| 3A | 2A |
| 3B | 2B |

[0131] Additionally, FIG. 4A shows an exemplary strategy for selecting the crRNA portion of the guide RNAs for disruption of Fel d 1 expression.

[0132] Alternatively, if a Cas9 “nickase” is used, a total of four crRNAs would be chosen (as this would require two pairs of single-stranded breaks), such as shown in the following table. Such a strategy is also shown in FIG. 4B.

TABLE 4
Exemplary crRNA Target Sites for Cas9 Nickase

| 1^{st} site | 2^{nd} site | 3rd site | 4^{th} site |
|---|---|---|---|
| 1A | 1B | 2A | 2B |
| 3A | 3B | 4A | 4B |
| 1A | 1B | 4A | 4B |
| 3A | 3B | 2A | 2B |

[0133] However, the crRNA target sites shown in FIG. 3 are merely exemplary. The target sites can be chosen to excise a Fel d 1 genomic sequence or associated region that is anywhere from about 0.01 kb to 50 kb in length, including at least about 0.02, 0.03, 0.04, 0.05, 0.06, 0.07, 0.08, 0.09, 0.1, 0.2, 0.3, 0.4, 0.5, 0.6, 0.7, 0.8, 0.9, 1, 2, 3, 4, 5, 6, 7, 8, 9, 10, 11, 12, 13, 14, 15, 16, 17, 18, 19, 20, 21, 22, 23, 24, 25, 26, 27, 28, 29, 30, 31, 32, 33, 34, 35, 36, 37, 38, 39, 40, 41, 42, 43, 44, 45, 46, 47, 48, and 49 kb in length.

[0134] Table 5 shows exemplary target DNA sequences for the sites discussed above, as well as the corresponding crRNA sequences.

TABLE 5
Exemplary crRNA Target Site Sequences

| crRNA Target Site | DNA Sequence | PAM | crRNA |
|---|---|---|---|
| 1A | ggtgtctggattccagcttt | AGG | ggugucuggauuccagcuuu |
| | (SEQ ID NO: 680) | | (SEQ ID NO: 1234) |
| 1B | ctgttctttacacctaaagc | TGG | cuguucuuuacaccuaaagc |
| | (SEQ ID NO: 1166) | | (SEQ ID NO: 1235) |
| 2A | accttgcccagagtgagacc | TGG | accuugcccagagugagacc |
| | (SEQ ID NO: 254) | | (SEQ ID NO: 1236) |
| 2B | ccaagagccaggtctcactc | TGG | ccaagagccaggucucacuc |
| | (SEQ ID NO: 532) | | (SEQ ID NO: 1237) |
| 3A | gactagtccatccaagaccc | TGG | gacuaguccauccaagaccc |
| | (SEQ ID NO: 851) | | (SEQ ID NO: 1238) |
| 3B | cggactcttatccagggtct | TGG | cggacucuuauccagggucu |
| | (SEQ ID NO: 1158) | | (SEQ ID NO: 1239) |
| 4A | caatgcacgacctgtagtat | TGG | caaugcacgaccuguaguau |
| | (SEQ ID NO: 266) | | (SEQ ID NO: 1240) |
| 4B | ctggcatttgccaatactac | AGG | cuggcauuugccaauacuac |
| | (SEQ ID NO: 361) | | (SEQ ID NO: 1241) |

[0135] In embodiments, the crRNA targets are chosen to induce any appropriate mutation that results in disrupted, reduced, or eliminated expression of Fel d 1, including insertions, deletions, frameshift mutations, and the like.

[0136] In some embodiments, a single crRNA target site is chosen to introduce disruptions that render the Fel d 1 gene non-functional. For example, double-stranded breaks at a single target site introduced by Cas9 are repaired by non-homologous end joining (NHEJ), which can result in the insertion and deletion of a few base pairs which can introduce frameshift mutations which effectively knock-out the Fel d 1 gene by shifting the reading frame. In another example, a piece of DNA (“donor”) whose ends are identical to the region of interest (i.e. Feld 1 genomic sequence) is introduced, along with a sgRNA and Cas9 nuclease. As a result of repair by homology-directed repair (HDR), the donor DNA is introduced into the genome resulting in introduction of a foreign sequence into the Fel d 1 genomic sequence which effectively “knocks in” the foreign DNA. The foreign DNA sequence can be inserted so that the entire region is rendered non-functional, or that the foreign DNA sequence is expressed. The foreign DNA sequence may include, for example, an epitope tag (such as c-myc) or a reporter (such as green fluorescent protein (GFP)) and/or a non-functional Fel d 1 gene. Such procedures have been reviewed (see Wang et al., One-Step Generation of Mice Carrying Mutations in Multiple Genes by CRISPR/Cas-Mediated Genome Engineering, 153 (4): 910-918, 2013; Yang et al., One-Step Generation of Mice Carrying Reporter and Conditional Alleles by CRISPR/Cas-Mediated Genome Engineering, 154 (6): 1370-1379, 2013).

### Example: In Silico Identification of Guide RNA Target Sequences

[0137] A program that identifies guide RNA Target Sequences from a particular genomic sequence was used to identify a list of candidate guide RNA Target Sequences. The program is available on the Broad Institute website (http://www.broadinstitute.org/rnai/public/analysis-tools/sgrna-design). The genomic sequences of Fel d 1 chain 1 and chain 2, with 1 kb additional sequence on either side of them, were submitted separately to the program. For chain 1, the total length of the target sequence was 4516 base pairs (full sequence is set forth in SEQ ID NO: 1226), and for chain 2 the total length was 4416 base pairs (full sequence is set forth in SEQ ID NO: 1227). Additional parameters are provided in the table below (definitions can be found below):

TABLE 6

| | | | | | Off-Target | | |
|---|---|---|---|---|---|---|---|
| | | | Target | Initial | Match | | Off-Target |
| | Target | PAM | Window | Spacing | Ruleset | Off-Target | Match |
| Quota | Taxon | Policy | Policy | Requirement | Version | Tier Policy | Bin Policy |
| 8 | 9506 | NGG | 5-65 | 5 | 1 | 1 | 5.20.100 |

Quota = Desired number of candidate sgRNA sequences to pick for this target.
Target Taxon = Taxon of the target gene.
PAM Policy = Currently limited to NGG only.
Target Window Policy = Portion of the target region (as defined by Target Mode) which is preferentially targeted (given as a percent range, e.g. 5-65 means target the region between the 5th and 65th percentile of the target region).
Initial Spacing Requirement = When possible, pick sgRNA sequences which are separated by a certain distance (measured here in terms of percentage of the length of the entire target region). This is called “Initial” because, this requirement is relaxed in subsequent picking “rounds” if the quota is not met after examining all candidate sgRNAs for the target.
Off-Target Match Rule Set Version (“CFD score”) = Method of calculating an off-target match, or “CFD” (Cutting Frequency Determination) score; currently there is only one off-target rule set (“1”).
Off-Target Tier Policy = Method used to categorize off-target matches into “Tiers”; currently there is only one such policy (“1”), which breaks down as follows: Tier I: protein-coding regions; Tier II: any position within the transcribed sequence of a coding gene (intron or exon); Tier III: any position within the transcribed sequence of a non-coding gene; Tier IV: positions not contained in any gene (i.e. not transcribed).
Off-Target Match Bin Policy = Thresholds used to categorize off-target matches into “Match Bins” according to CFD score. There are four bins notated by three thresholds in increasing numerical order, separated by periods. Threshold values are in hundredths. For example, “5.20.100” represents the following 4 bins: Bin I: CFD = 1.0, Bin II: 1.0 > CFD ≥ 0.2, Bin III: 0.2 > CFD ≥ 0.05, Bin IV: 0.05 > CFD.

[0138] SEQ ID NOS: 1-1225 lists exemplary target sequences obtained from the above procedure. In general, the sequences were obtained from the corresponding chain (chain 1 or chain 2) and strand (sense or antisense) in which the target sequence is found, using a PAM Sequence of NGG, where N=A, C, G, or T. A total of 1428 target sequences were identified (795 for chain 1 and 633 for chain 2); however there were duplicates in this initial set so that 1225 of the 1428 are unique sequences and are set forth as SEQ ID NOS: 1-1225. With respect to the 1225 unique sequences, the following table represents the correspondence with SEQ ID NOS, Fel d 1 chain, strand, and the PAM sequence used to identify the sequences.

TABLE 7

| | | | PAM |
|---|---|---|---|
| Sequences | Chain | Strand | Sequence |
| SEQ ID NOS: 1-105 | 1 | sense | AGG |
| SEQ ID NOS: 106-123 | 1 | sense | CGG |
| SEQ ID NOS: 124-248 | 1 | sense | GGG |
| SEQ ID NOS: 249-323 | 1 | sense | TGG |
| SEQ ID NOS: 324-400 | 1 | antisense | AGG |
| SEQ ID NOS: 400-412 | 1 | antisense | CGG |
| SEQ ID NOS: 413-509 | 1 | antisense | GGG |
| SEQ ID NOS: 510-593 | 1 | antisense | TGG |
| SEQ ID NOS: 594-702 | 2 | sense | AGG |
| SEQ ID NOS: 703-718 | 2 | sense | CGG |
| SEQ ID NOS: 719-803 | 2 | sense | GGG |
| SEQ ID NOS: 804-881 | 2 | sense | TGG |
| SEQ ID NOS: 882-985 | 2 | antisense | AGG |
| SEQ ID NOS: 986-1008 | 2 | antisense | CGG |
| SEQ ID NOS: 1009-1118 | 2 | antisense | GGG |
| SEQ ID NOS: 1119-1225 | 2 | antisense | TGG |

[0139] Target sequences are located in the target DNA region and are referred to herein as the sgRNA Target Sequences. Corresponding crRNAs are identical in sequence to the target sequences. For example, appropriate crRNAs corresponding to the sgRNA Target Sequences provided in SEQ ID NOS: 1-1225 can include: AAAAAAAAAAUAAAGUGACC (SEQ ID NO: 1242) (crRNA encoded by target sequence of SEQ ID NO: 1); AAAAAUGACAGAAGAGGAUA (SEQ ID NO: 1243) (crRNA encoded by target sequence of SEQ ID NO: 2), etc.

[0140] Additionally, it is possible to rank the guide RNA target sequences according to an algorithm that predicts off-target and on-target effects. For example, algorithms can rank and pick candidate sgRNA sequences for the targets provided, while attempting to maximize on-target activity and minimizing off-target activity, if a reference genome is available. For example, the Broad Institute tool uses “Rule Set 2” (developed in conjunction with the Azimuth project at Microsoft Research) to model sgRNA on-target activity, and the CFD (Cutting Frequency Determination) score to evaluate off-target sites.

[0141] Additional tools for identifying guide RNA Target Sequences include those found at http://crispr.mit.edu/(see Hsu et al, DNA targeting specificity of RNA-guided Cas9 nucleases, Nature Biotechnology 31, 827-832 (2013)) and http://www.c-crisp.org/(see Heigwer, F., Kerr, G. & Boutros, M., E-CRISP: fast CRISPR target site identification. Nat. Methods 11, 122-123 (2014)).

### Example: Oligonucleotide Synthesis

[0142] Once guide RNA Target Sequences have been identified, DNA oligonucleotide sequences encoding guide RNAs and Cas9 may be synthesized. For example, the oligonucleotide sequences may be identical to any of the sgRNA Target Sequences set forth in SEQ ID NOS: 1-1225. In other embodiments, the oligonucleotide is at least 60%, 65%, 70%, 75%, 80%, 85%, 90%, or 95% identical to a sgRNA Target Sequence set forth in SEQ ID NOS: 1-1225. In specific aspects of the invention, the oligonucleotide encoding the crRNA portion of the guide RNA will be a 18-mer to 22-mer, such as a 20-mer, that is at least 60%, 65%, 70%, 75%, 80%, 85%, 90%, or 95% identical to the 20-mers set forth in SEQ ID NOS: 1-1225. Chemical synthesis of polynucleotides can be performed, for example, on commercial automated oligonucleotide synthesizers. Additionally, the oligonucleotide sequences may encode a tracrRNA portion. Examples of such tracrRNA-encoding oligonucleotides are set forth in SEQ ID NOS: 1228-1233. Further, oligonucleotides may be synthesized to encode any Cas9 protein or variant with dual or single endonuclease activity.

### Example: Cloning Into Vectors

[0143] General protocols for cloning include those found in Sambrook, Molecular Cloning: A Laboratory Manual, Cold Spring Harbor Press, Cold Spring Harbor, New York. For example, oligonucleotides encoding Cas9 and a pair of guide RNAs can be cloned into a single vector, or two separate vectors (one encoding Cas9 and one encoding the pair of guide RNAs). Protocols for such guide RNA and Cas9 cloning have been described (see Ran et al., 2013).

[0144] The vectors may be a plasmid or other recombinant vector which contains a promoter capable of expression of a transcript in mammalian cells, one or more cloning sites, a selectable marker for selection of transfected cells (e.g. Neomycin, Puromycin, Hydromycin, Zeocin/Bleo), and optionally a tag such as an epitope tag (e.g. FLAG, HA, Myc, 6xHis), protein purification tag (GST), or localization tag (GFP). Alternatively, the vectors may be viral vectors. Such viral vectors, and particularly retroviral vectors, have been used in a wide variety of gene delivery applications in cells, as well as living animal subjects. Viral vectors that can be used include, but are not limited to, retrovirus, adeno-associated virus, pox, baculovirus, vaccinia, herpes simplex, Epstein-Barr, adenovirus, geminivirus, and caulimovirus vectors. Additional examples of viral vectors include lentiviral vectors such as those based on HIV or FIV. Non-viral vectors include plasmids, liposomes, electrically charged lipids (cytofectins), DNA-protein complexes, and biopolymers. An example of a non-viral vector system is the Sleeping Beauty transposon system, which has been reviewed (see Aronovich, E. L., The Sleeping Beauty transposon system: a non-viral vector for gene therapy, Hum Mol Genet. 2011 Apr. 15; 20 (R1): R14-R20). In addition to a nucleic acid, a vector may also comprise one or more regulatory regions, and/or selectable markers useful in selecting, measuring, and monitoring nucleic acid transfer results (transfer to which tissues, duration of expression, etc.).

[0145] Examples of commercially-available mammalian expression vectors include p3xFLAG-CMV™ (Sigma Aldrich), p3xFLAG-Myc-CMV™ (Sigma Aldrich), pBI-CMV (Clontech), pcDNA™3.1 (Life Technologies), pCMV-Tag (Agilent Technologies), pIRES (Clontech), and others.

[0146] In aspects of the invention, vectors that may be used in the inventive methods may employ any of the following:
[0147] 1) An RNA pol III promoter (such as a U6 promoter) for guide RNA expression.
[0148] 2) A constitutive mammalian cell promoter for expression of Cas 9.
[0149] 3) A nuclear localization signal (NLS) for directing Cas9 into the nucleus.
[0150] 4) A Green-Fluorescent Protein (GFP) tag.
[0151] 5) A tracrRNA sequence (gRNA scaffold).
[0152] 6) A site for cloning a guide sequence (crRNA) oligonucleotide upstream of the tracrRNA sequence (G (N) 20 gRNA) by way of restriction enzyme digestion.
[0153] 7) One or more selectable markers.

[0154] FIGS. 5A and 5B show examples of two basic expression cassettes for independent use or for incorporating into vectors. FIG. 5A shows an expression cassette comprising (from 5′ to 3′) a promoter and a chimeric DNA polynucleotide comprising a polynucleotide encoding a crRNA and a polynucleotide encoding a tracrRNA. Together the crRNA and tracrRNA make up the guide RNA that directs the Cas9 protein to a specific site in the genome. The promoter shown in FIG. 5A can be a pol III promoter such as a U6 promoter.

[0155] FIG. 5B shows an expression cassette comprising a promoter located 5′ of a polynucleotide encoding Cas9. The Cas9 encoding sequence is flanked by two nuclear localization signals (NLS). Additionally, the codons of the Cas9 encoding sequence can be optimized for expression in a species of interest (i.e. Felis catus cells). At the 3′ end of the expression cassette is a polynucleotide sequence encoding a poly-adenylation site. However, in other embodiments, such as use in lentiviral vectors, the nuclear localization signals may not be needed. One who is skilled in the art of molecular biology can customize the expression cassettes according to the requirements for a particular application. The promoter may be a mammalian promoter, an inducible promoter, a tissue-specific promoter, or the like.

[0156] Examples of animal and mammalian promoters known in the art include, but are not limited to, the SV40 early (SV40c) promoter region, the promoter contained in the 3′ long terminal repeat (LTR) of Rous sarcoma virus (RSV), the promoters of the E1A or major late promoter (MLP) genes of adenoviruses (Ad), the cytomegalovirus (CMV) early promoter, the herpes simplex virus (HSV) thymidine kinase (TK) promoter, a baculovirus IE1 promoter, an elongation factor 1 alpha (EF1) promoter, a phosphoglycerate kinase (PGK) promoter, a ubiquitin (Ubc) promoter, an albumin promoter, the regulatory sequences of the mouse metallothionein-L promoter and transcriptional control regions, the ubiquitous promoters (HPRT, vimentin, beta-actin, tubulin and the like), the promoters of the intermediate filaments (desmin, neurofilaments, keratin, GFAP, and the like), the promoters of therapeutic genes (of the MDR, CFTR or factor VIII type, and the like), pathogenesis or disease related-promoters, and promoters that exhibit tissue specificity and have been utilized in transgenic animals, such as the elastase I gene control region which is active in pancreatic acinar cells; insulin gene control region active in pancreatic beta cells, immunoglobulin gene control region active in lymphoid cells, mouse mammary tumor virus control region active in testicular, breast, lymphoid and mast cells; albumin gene, Apo AI and Apo All control regions active in liver, alpha-fetoprotein gene control region active in liver, alpha 1-antitrypsin gene control region active in the liver, beta-globin gene control region active in myeloid cells, myelin basic protein gene control region active in oligodendrocyte cells in the brain, myosin light chain-2 gene control region active in skeletal muscle, and gonadotropic releasing hormone gene control region active in the hypothalamus, pyruvate kinase promoter, villin promoter, promoter of the fatty acid binding intestinal protein, promoter of the smooth muscle cell beta-actin, and the like. In addition, these expression sequences may be modified by addition of enhancer or regulatory sequences and the like.

[0157] Other types of promoters that may be used in the expression cassettes may include, without limitation, tissue-specific promoters, inducible promotors, light-regulated promoters, developmental-specific promoters, and the like.

[0158] As an example of tissue-specific promoters which may be useful according to the inventive methods, salivary gland-specific promoters such as parotid secretory protein (PSP) promoter, proline-rich protein (PRP) promoter, and salivary amylase promoter are described in Canadian Patent No. CA2369672C. Skin-specific promoters, such as keratin promoters for epidermal expression have also been described (see Blessing et al., Genes. Devel., 7, 204-15 (1993); Blessing et al., J. Cell. Biol., 135, 227-39 (1993); and Byrne et al., Mol., Cell. Biol., 13, 3176-90 (1993)). Other skin-specific promoters include E-cadherin, elastin or alpha-1 collagen promoters. These and other tissue-specific promoters known in the art may be useful for tissue-specific deletion of Fel d 1 expression.

[0159] Inducible promoters activate a level of gene expression that is dependent on the level of a ligand that is present to activate the promoter. Examples of inducible promoters are known in the art, and include those activated by tetracycline (TET-ON), rapamycin or its derivatives, or various steroidal ligands (e.g., glucocorticoid, estrogen, progestin, retinoid, or ecdysone) or analogs or mimetics thereof. Inducible promoter systems that are commercially available include the T-REX™ System (ThermoFisher Scientific, Waltham, MA) which is a mammalian expression system based on the binding of tetracycline to the Tet repressor and derepression of the promoter controlling expression of the gene of interest, as well as the Tet-On 3G Tetracycline-Inducible Gene Expression Systems (Clontech Laboratories, Inc., Mountain View, CA).

[0160] FIG. 6A shows a recombinant vector useful for cloning an oligonucleotide encoding a custom crRNA for expression of a guide RNA. The vector comprises (from 5′ to 3′) a promoter, a cloning site, and a polynucleotide encoding the tracr/scaffold portion of the guide RNA. For example, any of the 1225 polynucleotides set forth in SEQ ID NOS: 1-1225 can be synthesized as 20-mers and flanked with bases to match the restriction enzyme sites in the cloning site and cloned into the vector. FIG. 6B shows the vector of FIG. 6A with an oligonucleotide with a sequence chosen from one of the sequences set forth in SEQ ID NOS: 1-1225 cloned into the vector to complete the expression cassette.

[0161] FIG. 7 shows a vector with the expression cassette of FIG. 5B.

[0162] Additionally, vectors containing multiple expression cassettes are possible for multiplex gene targeting. For example, FIG. 8A shows a vector capable of expressing two guide RNAs, while FIG. 8B shows a vector capable of expressing up to 8 guide RNAs. Additionally, expression cassette encoding guide RNAs and Cas9 may be provided in separate vectors or the same vector. For example, FIG. 9A shows a vector capable of expressing a single guide RNA and Cas9, while FIG. 9B shows a vector capable of expressing a pair of guide RNAs and Cas9.

[0163] Additionally, a number of publicly-available vectors can be used for one or two-vector systems of guideRNA and Cas9 expression. Examples of commercially-available Cas9 vectors include pSpCas9 BB-2A-GFP (PX458), pLentiCRISPR v2, pLentiGuide-Puro, pGS-gRNA, pGS-gRNA-Neo, pAAV SpCas9 acceptor (PX552) (GenScript, Piscataway, NJ). Non-profit plasmid repositories such as Addgene are another source of vectors capable of expressing guideRNAs and Cas9.

### Example: Testing of Guide RNA Sequences

[0164] Guide RNA sequences may be tested for activity prior to testing in cell culture through routine methods. For example, in some embodiments, guide RNA sequences of interest are first synthesized by in vitro transcription. Next, individual guide RNA sequences may be tested in vitro to determine their efficacy. For example, in one embodiment, a target sequence may be synthesized and amplified by PCR to create a template. In a preferred embodiment, the genomic DNA target sequence of the particular cat cell line to be used in the implementation of the inventive methods is directly amplified by PCR to create the template. This ensures that the results would be representative of what would happen in the cell line of interest. The template may then be combined with a guide RNA of interest and a Cas9 nuclease. The efficiency with which Cas9 nuclease cleaves the template can then be measured using agarose gel electrophoresis. Such testing is available from commercially available kits (In Vitro Transcription and Screening Kits for sgRNA, Clontech Laboratories Inc, Mountain View, CA).

[0165] Alternatively or in addition, guide RNA sequences are tested in cell culture. Guide RNAs can be delivered to cells as either PCR amplicons containing an expression cassette or guide RNA-expressing plasmids. In addition to PCR and plasmid-based delivery methods, Cas9 and sgRNAs can be introduced into cells as mRNA and RNA, respectively. Alternatively, cultured cells can be transfected with Cas9 proteins and synthetic guide RNA oligonucleotides using conventional lipofection reagents. This generally involves: 1) assembly of a ribonuclear protein complex (RNP) by duplexing crRNA and tracrRNA oligos and mixing with Cas9 protein 2) reverse transfecting the RNP complex in cultured cells by way of transfection reagent.

[0166] For example, in one embodiment, 20-mer oligonucleotides encoding a pair of guide sequences may be synthesized into commercially available Cas9 vectors (all-in-one vector) and prepared for transfection into feline cell lines. Alternatively, the pair of guide sequences and Cas9 may be cloned into separate vectors (two-vector system). The following is an exemplary protocol for testing guide RNA sequences in cell culture.

[0167] Feline host cells are cultured in Eagle's Minimum Essential Medium supplied with fetal bovine serum to a final concentration of 10%. The cultures are incubated at 37° C. and subcultured when cell concentration is between 6 and 7×10⁴ cells/cm². The cells are then seeded 4-6×10⁴ cells/cm² in cell culture plate one day before transfection.

[0168] Guide RNA and Cas9 are introduced into feline host cells using standard methods. Vectors containing DNA encoding guide RNA and Cas9 may be introduced into the desired host cells by methods known in the art, e.g., transfection, electroporation, microinjection, transduction, cell fusion, DEAE dextran, calcium phosphate precipitation, lipofection (lysosome fusion), use of a gene gun, or a DNA vector transporter. Two to three days after transfection, the cell pool can be analyzed directly by Sanger sequencing, NGS (Next Generation Sequencing) and/or Surveyor assay. Sanger sequencing of the target region can detect overlapping peaks at close region of double strand break (DSB), if small insertion or deletion (indel) mutations are introduced. Surveyor assay (or T7E1 assay) uses enzymes of mismatch-specific DNA endonucleases to detect indel mutations at the targeted loci. By targeting and digesting mismatched heteroduplex double-strand DNA, this assay produces two or more smaller fragments, depending on number of mismatched sites on the region analyzed.

[0169] Transfected cells can be selected using antibiotic resistance or a GFP reporter if they are present on the Cas9 expression plasmid. Transfected cells (with or without selection) can be plated into 96 well plates at 1 cell/well density for cloning. This procedure can be also conducted using diluted host cell line on 10 cm plate to form colonies, which can be picked up and transferred to 24 well plate for future usage.

[0170] After expansion of the clones, the cells in each clone can be analyzed by Sanger sequencing to identify the clones harboring a mutation at the target region. Sequencing trace files will show overlapping peaks at regions where double strand breaks have been repaired by introducing small indels.

[0171] Alternatively, knock-out cell lines can be confirmed by Western Blot if a specific antibody is available, or through ELISA or other immunoassay.

[0172] Additionally, high throughput screening assays can be developed which assess guide RNA efficacy. Briefly, feline cells may be cultured in 96-well or 384-well plates. A library of sgRNA vectors may than be used to transfect the cells (two sgRNA sequences per well). After transfection the cells may be prepared for PCR based on amplification of an internal Fel d 1 sequence to confirm efficacy of each vector design, where successful knockout results in lack of amplification and vice versa. Alternatively or in addition, a cell line that expresses Fel d 1 can be used for the assay, and the cell media can be assayed for the Fel d 1 protein using an immunological-based assay such as a Radio Immune Assay (RIA) or ELISA.

### Creating Transgenic Cats

[0173] Once the efficacy of guide RNAs for Cas9-mediated knock out of Fel d 1 is confirmed, such guide RNAs can be used with Cas9 to create a transgenic cat. General procedures for gene targeting and animal cloning are available (see Denning C, and Priddle, H, New frontiers in gene targeting and cloning: success, application and challenges in domestic animals and human embryonic stem cells, Reproduction (2003) 126, 1-11; and Wang, B, and Zhou, J, Specific genetic modifications of domestic animals by gene targeting and animal cloning, Reproductive Biology and Endocrinology (2003), 1:103). The following Examples describe three different methodologies for creating Fel d 1 knockout cats.

### Example: Cloning a Genetically Engineered Fel d 1 Knockout Cat by Nuclear Transfer

[0174] The following Example is adapted from Shin et al., A cat cloned by nuclear transplantation: This kitten's coat-coloration pattern is not a carbon copy of its genome donor's, Nature, Vol 415 (2002), 859 and Supplementary Information.

### Oocyte Recovery and In Vitro Oocyte Maturation

[0175] Reproductive tracts from queens greater than 6 months of age are collected from routine ovariohysterectomy at local veterinary clinics. Ovaries are removed from the tract, rinsed in TL-Hepes, and then minced with a scalpel blade to release immature ova. For in vitro maturation, cat ova are then cultured in TCM 199 with Earle's salts supplemented with 0.36 mM pyruvate, 2.0 mM L-glutamine, 2.28 mM calcium lactate, 1.13 mM cysteine, 1% of a solution containing 10,000 U/ml Penicillin G, 10,000 μg/ml Streptomycin (P/S), 10 ng/ml EGF, 1 IU/ml hCG, 0.5 IU/ml cCG and 3 mg/ml fatty acid free BSA (IVM medium) for 24-30 hrs under 5% CO₂, 5% O₂, and 90% N₂ gas and humidified air atmosphere at 38° C.

### Enucleation

[0176] Following in vitro maturation, cumulus cells are removed from the ova by gently pipetting for 3 minutes in Hepes-buffered TCM 199 supplemented with 0.1% hyluronidase. After removal of cumulus cells, the oocytes are placed in a petri dish containing Hepes-buffered TCM 199 supplemented with 3 mg/ml fatty acid free BSA, 15.0 μg/ml cytochalasin B and 5 μg/ml Hoechst 33342, and enucleated using a beveled glass pipette mounted on Narshige micromanipulators while viewing with a Zeiss Microscope. Enucleation is confirmed by observation under UV light.

### Cell Culture and Preparation of Donor Cells

[0177] Skin cells or adult fibroblast cells from a donor cat are isolated and cultured in an appropriate mammalian cell culture medium, supplemented with 10% FBS for 2-5 days at 37° C. in an atmosphere of 5% CO₂ and air. The cells are then transfected with a vector comprising an expression cassette encoding Cas9 and a pair of guide RNAs (one designed to target the 5′ flanking region of chain 2, and one designed to target the 3′ flanking region of chain 1). sgRNA Target Sequences are for example chosen from those set forth in SEQ ID NOS: 1-1225. A sequencing assay or assay for Fel d 1 expression is performed on a portion of the cells to confirm knockout of Fel d 1 or a portion thereof. The cells are passaged multiple times then collected, frozen, and stored in liquid nitrogen. Three to 5 days prior to nuclear transfer the cell line is thawed and maintained in 4-well dishes (Nunc, Denmark) in DMEM/F12, supplemented with 10% FCS+1% P/S at 37° C. in an atmosphere of in 5% CO₂ and air.

### Nuclear Transfer, Electrofusion and Oocyte Activation

[0178] For nuclear transfer, the engineered Fel d 1 knockout donor cells are removed from the incubator, trypsinized using a 1% trypsin-EDTA solution, and placed into a petri dish containing Ca²⁺, Mg²⁺ free D-PBS with 0.3% BSA. Micromanipulation is then used to place a single nuclear donor cell into the perivitelline space of enucleated ova.

[0179] For electrofusion, the ovum/cell couplets are equilibrated in 0.3 M mannitol solution containing 0.1 mM Mg²⁺, then transferred to an electrofusion chamber containing the same medium. Cell fusion is induced by applying 2, 3.0 kV/cm 25 μsec DC pulses delivered by a BTX Electrocell Manipulator 200 (BTX, San Diego, CA). The couplets are then removed from the fusion chamber, washed and incubated in TCM 199 supplemented with 0.3% BSA and 5.0 μg/ml cytochalasin B, at 38° C. in and atmosphere of 5% CO₂ and air. Two hours after electrofusion, fused couplets are removed from the incubator and equilibrated in 0.3 mM mannitol containing 0.1 mM Ca²⁺ and 0.1 mM Mg²⁺, then placed into a fusion chamber containing the same medium and electropulsed by applying 2×, 1.0 KV/cm 50 μsec pulses, 5 seconds apart. The ova are then removed from the fusion chamber, washed, and incubated for 6-7 hrs in TCM 199 supplemented with 0.3% BSA, 10 μg/ml cycloheximide and 5 μg/ml cytochalasin B in a 5% CO₂, 5% O₂, 90% N₂ gas mixture in humidified air at 38° C. Cloned embryos are then cultured in modified Tyrode's solution supplemented with 0.36 mM pyruvate, 1.0 mM L-glutamine, 2.28 mM calcium lactate, 1% non-essential amino acids (NEAA) and 3 mg/ml fatty acid free BSA (IVC 1 medium) for 1-3 days.

### Synchronization of Recipient Females and Embryo Transfer

[0180] Cloned embryos are surgically transferred into the oviducts of recipient queens. Estrus synchronization of recipient queens is attained using the same hormone injection regimen described above. Following embryo transfer, transabdominal ultrasonography is utilized to monitor for pregnancy.

[0181] Cloned kittens are reared to 6 months of age. Samples of saliva are tested for the production of Fel d 1 according to an ELISA assay. Additionally, kittens are anesthetized and a biopsy of the salivary gland is taken. Salivary gland explants are grown in organ culture dishes in DMEM with 10% FCS on filter paper. The explants are subject to genomic DNA extraction as described above and PCR and sequence analysis. ELISA testing of saliva samples shows no detectable Fel d 1 in comparison to controls, and PCR and sequencing analysis confirm complete disruption of chain 1 and chain 2 Fel d 1 genomic DNA.

[0182] Alternatively or in addition to ELISA testing, Western Blot Analysis can be used to confirm lack of Fel d 1 production in saliva or explant samples.

### Example: Cloning a Genetically Engineered Fel d 1 Knockout Cat by Direct Gamete Genetic Modification

[0183] The following Example is adapted from Wongsrikeao et al., Antiviral restriction factor transgenesis in the domestic cat, Nat Methods.; 8 (10): 853-859 (2011), incorporated by reference herein in its entirety. The skilled artisan can supplement this Example with specific details provided in the Wongsrikeao manuscript and Supplemental Materials.

[0184] Gametes from both domestic sexes are obtained without added animal procedures by micro-dissecting gonads discarded after spaying or neutering. In vitro matured grade I and II domestic cat oocytes are subjected to perivitelline space microinjection (PVSMI) with 100 picoliters of concentrated lentiviral vector. The lentiviral vector includes expression cassettes for two guide RNAs (one designed to target the 5′ flanking region of chain 2, and one designed to target the 3′ flanking region of chain 1) as well as Cas9. Injection is timed 10-12 h before or 10-12 hr after in vitro fertilization (IVF) with feline sperm. The embryos are then cultured and selected for implantation from cleaved, post-IVF oocytes and are transferred into surgically exposed fallopian tubes at 48-72 hours after lentiviral vector transduction. The transfers are performed in hormonally synchronized queens prepared by a 14/10 hour light/dark environment. Queens are administered PMSG on day-4, and HCG on day-1 with respect to lentiviral vector transduction and are mated ad lib from the day of HCG injection until the day before embryo transfer with a vasectomized, azoospermia-verified tomcat to induce ovulation and corpus luteum formation. At surgery follicles are punctured with a needle if not naturally ovulated. The implanted embryos are allowed to develop in utero. Skin and salivary gland samples from kittens are assessed for Fel d 1 protein expression and genomic deletion. The results show complete knockout of Fel d 1, and complete lack of production of this allergen.

### Example: Cloning a Genetically Engineered Fel d 1 Knockout Cat by Embryonic Stem Cell Manipulation

[0185] Embryonic stem cells of a cat are cultured and transfected with a vector comprising an expression cassette encoding Cas9 and a pair of guide RNAs (one chosen to target an interior region of chain 2, and one chosen to target a 3′ flanking region of chain 1). Sequencing analysis may be performed on a sample of the culture to confirm knockout of all or a portion of a Fel d 1 genomic sequence. The embryonic stem cells may then be transferred to a blastocyst by aggregation or injection. Manipulated embryos are then transferred to a pseudopregnant female recipient cat and allowed to mature. The resulting offspring are heterozygotes for the Fel d 1 knockout. Heterozygotes are then cross-bred to produce homozygotes for the Fel d 1 knockout.

[0186] Detailed procedures for embryonic stem cell derivation, culture, manipulation, and implantation are known in the art and are described in U.S. Patent Application Publication No. 2003/0177512, incorporated by reference. The skilled artisan can supplement this Example with specific details provided in the '512 Patent Application Publication.

### Example: Treatment of Salivary Glands of an Adult Wild-Type Cat

[0187] An FIV-based vector is genetically engineered to include expression cassettes encoding Cas9 and a pair of guide RNAs selected to target two of the guide RNA target sequences set forth in SEQ ID NOS: 1-1225. The guide RNAs are selected to target flanking regions of Fel d 1 sequences (e.g., one upstream of chain 2, one downstream of chain 1). The expression cassettes are driven by a salivary-gland specific promoter (salivary amylase promoter) to minimize the potential for systemic effects. Viral particles are produced by the transfection of 293 T cells with transfer vector, packaging vector, and envelope vector. Supernatants are collected 48 and 72 h post-transfection. Viral particles are concentrated 100-fold from pooled supernatants spun in an ultracentrifuge resuspended in PBS. Viral titers of the FIV-based vector are determined by FACS analysis of 293 T cells infected with diluted viral supernatant.

[0188] A 12 month-old male domestic cat is given a combination of Dexmedetomidine (0.025-0.0375 mg/kg IM)+Butorphanol (0.4-0.6 mg/kg IM)+Ketamine (5-7.5 mg/kg IM). The cat's salivary glands are cannulated through their ducts using an extended polyethylene tube. The cannulated glands are repeatedly inoculated with the FIV-based vector. The cannulas are then removed and the cat is allowed to recovery from the procedure.

[0189] At 1 week, 2 weeks, and 1 month post-procedure, samples of saliva are tested for the production of Fel d 1 according to Western Blot Analysis. Additionally, the cat is re-anesthetized and a biopsy of the salivary gland is taken. Salivary gland explants are grown in organ culture dishes in DMEM with 10% FCS on filter paper. The explants are subject to genomic DNA extraction as described above and PCR and sequencing analysis. Western blot analysis of saliva samples show no Fel d 1 immunoreactivity in comparison to controls, and PCR sequencing analysis, or Surveyor Assay to confirm complete excision of chain 1 and chain 2 Fel d 1 genomic DNA.

### Example: Treatment of Skin of an Adult Wild-Type Cat

[0190] An FIV-based vector is genetically engineered to include expression cassettes encoding Cas9 and a pair of guide RNAs that are selected to target internal regions of Fel d 1 sequences (e.g., one internal to chain 1 and one internal to chain 2). The guide RNAs, and in particular the crRNA portion of the sgRNA, can be chosen based on the sgRNA Target Sequences provided in SEQ ID NOS: 1-1225. The expression cassettes are driven by a skin-specific promoter (keratin promoter) to minimize the potential for systemic effects. Viral particles of the FIV-based vector are produced as described in the previous example. The FIV-based vector is then injected intradermally into a 3 year-old female domestic cat using a 34 gauge needle. Alternatively, the cat is shaved to expose the skin and the FIV-based vector of the previous example is topically applied in a formulation that includes a permeation enhancer such as alcohols (e.g., methanol), alkyl methyl sulfoxides (e.g., DMSO), pyrrolidones (e.g., 2-pyrrolidone), surfactants, urea, glycerol monolaurate, polyethylene glycol monolaurate, glycerol monolaurate, docainehydrochloride, hydrocortisone, menthol, or methyl salicylate. Optionally, the skin is subject to reversible electroporation to enhance uptake of the vector according to established methods, such as those described in U.S. Pat. No. 6,697,669, incorporated by reference.

[0191] At 1 week, 2 weeks, and 1 month post-procedure, samples of skin are biopsied and subject to analysis of Feld 1 expression or genomic deletion as described in the previous example. The results show no Fel d 1 immunoreactivity in comparison to controls and confirm excision of Feld 1 genomic DNA at the target sequences.

### Example: Systemic Treatment of a Juvenile Wild-Type Cat

[0192] A catheter is placed in the cephalic vein of a 6 month old cat using a 22 gauge needle. An FIV-based vector is genetically engineered to include expression cassettes encoding Cas9 and a pair of guide RNAs selected to target two of the guide RNA target sequences set forth in SEQ ID NOS: 1-1225. The guide RNAs are selected to target flanking regions of Fel d 1 sequences (e.g., one upstream of chain 2, one downstream of chain 1). Viral particles of the FIV-based vector are produced as described previously. The expression cassettes for Cas9 are optionally driven by promoters for keratin and amylase, which limit expression to skin and salivary glands, respectively. The FIV-based vector is administered intravenously once a day for 5 consecutive days. At 1 month, 3 months, and 6 months post-procedure, samples of skin and salivary gland are biopsied and subject to analysis of Fel d 1 expression or genomic deletion as described in the previous examples. The results show no Fel d 1 immunoreactivity in comparison to controls and confirm complete excision of chain 1 and chain 2 Fel d 1 genomic DNA.

### Example: Inactivation of Fel d 1 by Knock-In of Green Fluorescent Protein

[0193] A plasmid donor (400 ng), with two homology arms on each side flanking a green fluorescent protein (GFP) reporter is introduced into cat zygotes along with a vector encoding Cas9 and a guide RNA. Each of the homology arms is around 800 bp. The sgRNA and plasmid donor are designed to insert the GFP reporter in place of the Fel d 1 promoter and the Chain 1 and Chain 2 start codons. The plasmid donor would be used as a template in the process of HDR for scaling the double-stranded break in the DNA. In this way, the coding sequence of GFP in between the homology arms would take the place of the promoter region and start codons, when the break is repaired. A stop codon is included in the plasmid donor after the GFP reporter gene sequence so that only the GFP sequence is expressed. After injection of the vectors into zygotes, in vitro differentiated blastocysts are explanted into culture to derive embryonic stem cells. PCR genotyping and sequencing is used to identify embryonic stem cell lines carrying a correctly targeted insert. GFP expression is confirmed via a microplate fluorescence reader using appropriate excitation and emission filter settings. Cat zygotes with the correct insertion are then allowed to develop into embryos, which are implanted into recipient female cats and allowed to develop to term. The live-born kittens are confirmed to express GFP and also lack Fel d 1 expression as described in previous examples.

### Example: Confirmation of Fel d 1 Hypoallergenicity

[0194] Allergy testing can be performed on a group of confirmed human Fel d 1 allergy sufferers to confirm success of Fel d 1 knockout procedures in producing a Fel d 1 hypoallergenic phenotype. For example, cat hair or saliva may be collected from a Fel d 1 knockout cat and an extract of the hair or saliva may be prepared and used as an inoculant in skin testing procedures (skin prick, intradermal, or skin patch testing). The results can be compared to a standardized cat hair extract indicated in skin testing diagnosis such as Greer's Standardized Cat Hair (GREER®, Lenoir, NC). Lack of an allergic response (e.g., swelling, redness, hives, sneezing, breathing difficulties, asthma, itchy skin, runny nose, stuffy nose, coughing, and/or eye irritation) can confirm that the particular Fel d 1 knockout results in a hypoallergenic phenotype.

[0195] Alternatively or in addition, serum samples from confirmed human Fel d 1 allergy sufferers may be collected and various in vitro immunoassays measuring IgE reactivity as well as allergenic activity known in the art may be performed using the aforementioned inoculants as test samples. For example, the ability of such test samples to inhibit the binding of Fel d 1 protein to IgE antibodies can be tested by way of a radioallergosorbent test (RAST) inhibition assay. Also, the activity of such test samples in a histamine release assay using the stripped basophil technique can be assessed and compared to that of Fel d 1 (see Chapman et al., The European Union CREATE Project: A model for international standardization of allergy diagnostics and vaccines, J Allergy Clin Immunol, 122 (5): 882-889 (2008)).

[0196] The present invention has been described with reference to particular embodiments having various features. In light of the disclosure provided above, it will be apparent to those skilled in the art that various modifications and variations can be made in the practice of the present invention without departing from the scope or spirit of the invention. For example, while the present disclosure, in embodiments, discusses genomic editing in Felis catus (the domestic house cat), the present invention contemplates compositions and methods for removal of Fel d 1 from any wild or domesticated feline, including those of genera Acinonyx, Caracal, Calopuma, Felis, Leopardus, Leplailurus, Lynx, Olocolobus, Pardofelis, Prionailurus, and Profelis. Additionally, one skilled in the art can recognize that the methods provided in this disclosure may be modified to target and remove other cat allergens. One skilled in the art will recognize that the disclosed features may be used singularly, in any combination, or omitted based on the requirements and specifications of a given application or design. When an embodiment refers to “comprising” certain features, it is to be understood that the embodiments can alternatively “consist of” or “consist essentially of” any one or more of the features. Other embodiments of the invention will be apparent to those skilled in the art from consideration of the specification and practice of the invention.

[0197] It is noted in particular that where a range of values is provided in this specification, each value between the upper and lower limits of that range is also specifically disclosed. The upper and lower limits of these smaller ranges may independently be included or excluded in the range as well. The singular forms “a,” “an,” and “the” include plural referents unless the context clearly dictates otherwise. It is intended that the specification and examples be considered as exemplary in nature and that variations that do not depart from the essence of the invention fall within the scope of the invention. Further, all of the references cited in this disclosure are each individually incorporated by reference herein in their entireties and as such are intended to provide an efficient way of supplementing the enabling disclosure of this invention as well as provide background detailing the level of ordinary skill in the art.

1-20. (canceled)

21. A method of editing a Fel d 1 gene in an isolated Felis catus cell, the method comprising:
introducing i) one or more gRNAs and ii) Cas9 into an isolated Felis catus cell and editing an endogenous Fel d 1 gene of the Felis catus cell in a manner to result in impaired or absent Fel d 1 protein expression;
wherein the gRNA are at least 60% identical to gRNA of SEQ ID NOS: 1244 to 2468.

22. The method of claim 21, wherein:
the gRNA are at least 75% identical to gRNA of SEQ ID NOS: 1244 to 2468.

23. The method of claim 22, wherein:
the gRNA are at least 90% identical to gRNA of SEQ ID NOS: 1244 to 2468.

24. The method of claim 21, wherein:
the gRNA are chosen from SEQ ID NOS: 1244 to 2468.

25. A genetically engineered Felis catus cell line:
comprising a Fel d 1 genomic sequence lacking at least a portion of the Fel d 1 genomic sequence of a cell line from which the engineered cell line is derived, wherein the portion lacking is a sequence at least 60% identical to any of SEQ ID NOS: 1-1225.

26. The genetically engineered Felis catus cell line of claim 25 comprising reduced or absent Fel d 1 protein expression.

27. The genetically engineered cell line of claim 26, wherein the reduced or absent Fel d 1 protein expression is hypoallergenic in humans.

28. A genetically engineered cat comprising the genetically engineered cell line of claim 25.

29. The genetically engineered cat of claim 28 comprising a Fel d 1 gene with reduced or absent Fel d 1 protein expression.

30. The genetically engineered cat of claim 29, wherein the reduced or absent Fel d 1 protein expression is hypoallergenic in humans.

31. The genetically engineered cat of claim 29, wherein the Fel d 1 protein expression is reduced or absent in skin, salivary glands, perianal glands, or lachrymal glands.

32. The genetically engineered cat of claim 28, wherein all or a portion of the Fel d 1 genomic sequence of the genetically engineered cat is deleted from somatic cells.

33. F1 progeny of a male and female cat of claim 28.

34. A method of deleting a genomic sequence from the genome of a Felis catus cell, comprising:
introducing guide RNA into a Felis catus cell and using a CRISPR system directing a double stranded break in the genome of the Felis catus cell, wherein at least a portion of a Fel d 1 gene is removed resulting in impaired or an absence of Fel d 1 protein expression.

35. The method of claim 34, wherein the portion of the Fel d 1 gene removed represents a conserved region identified from genomic sequencing data.

36. The method of claim 35, wherein the genomic sequencing data is obtained from genomic DNA isolated from feline tissue samples.

The application's sequence listing, which the Patent Office published only in electronic form, follows.

SEQUENCE LISTING (2468 sequences)

SEQ ID NO: 1 - DNA, 20 bp, Felis catus
  source 1..20: mol_type = unassigned DNA
aaaaaaaaaataaagtgacc

SEQ ID NO: 2 - DNA, 20 bp, Felis catus
  source 1..20: mol_type = unassigned DNA
aaaaatgacagaagaggata

SEQ ID NO: 3 - DNA, 20 bp, Felis catus
  source 1..20: mol_type = unassigned DNA
aaaagggttccaggctgggg

SEQ ID NO: 4 - DNA, 20 bp, Felis catus
  source 1..20: mol_type = unassigned DNA
aaagttcttgggcttacaga

SEQ ID NO: 5 - DNA, 20 bp, Felis catus
  source 1..20: mol_type = unassigned DNA
aaataaagtgaccaggtgac

SEQ ID NO: 6 - DNA, 20 bp, Felis catus
  source 1..20: mol_type = unassigned DNA
aaatactgagagagaggagg

SEQ ID NO: 7 - DNA, 20 bp, Felis catus
  source 1..20: mol_type = unassigned DNA
aaatttgcccagccgtgaag

SEQ ID NO: 8 - DNA, 20 bp, Felis catus
  source 1..20: mol_type = unassigned DNA
aacagtatagagaaactcaa

SEQ ID NO: 9 - DNA, 20 bp, Felis catus
  source 1..20: mol_type = unassigned DNA
aagacggggaaggggagcca

SEQ ID NO: 10 - DNA, 20 bp, Felis catus
  source 1..20: mol_type = unassigned DNA
aagcagaaaggagacccgtg

SEQ ID NO: 11 - DNA, 20 bp, Felis catus
  source 1..20: mol_type = unassigned DNA
aaggacacagattatgacga

SEQ ID NO: 12 - DNA, 20 bp, Felis catus
  source 1..20: mol_type = unassigned DNA
acacagattatgacgaaggc

SEQ ID NO: 13 - DNA, 20 bp, Felis catus
  source 1..20: mol_type = unassigned DNA
actgcagggcttcccccagg

SEQ ID NO: 14 - DNA, 20 bp, Felis catus
  source 1..20: mol_type = unassigned DNA
agaaaggagacccgtgaggg

SEQ ID NO: 15 - DNA, 20 bp, Felis catus
  source 1..20: mol_type = unassigned DNA
agaagaggggcggggcaggg

SEQ ID NO: 16 - DNA, 20 bp, Felis catus
  source 1..20: mol_type = unassigned DNA
agagaggatgatggaagggg

SEQ ID NO: 17 - DNA, 20 bp, Felis catus
  source 1..20: mol_type = unassigned DNA
agattcaggagactggctca

SEQ ID NO: 18 - DNA, 20 bp, Felis catus
  source 1..20: mol_type = unassigned DNA
agcaggtataaaagggttcc

SEQ ID NO: 19 - DNA, 20 bp, Felis catus
  source 1..20: mol_type = unassigned DNA
agggctccagaatcagattc

SEQ ID NO: 20 - DNA, 20 bp, Felis catus
  source 1..20: mol_type = unassigned DNA
aggggttctaacaccttccc

SEQ ID NO: 21 - DNA, 20 bp, Felis catus
  source 1..20: mol_type = unassigned DNA
aggtaaatatcaggaaccta

SEQ ID NO: 22 - DNA, 20 bp, Felis catus
  source 1..20: mol_type = unassigned DNA
agtagatgcagaaaagcagc

SEQ ID NO: 23 - DNA, 20 bp, Felis catus
  source 1..20: mol_type = unassigned DNA
agtggcaacagctcgtgcaa

SEQ ID NO: 24 - DNA, 20 bp, Felis catus
  source 1..20: mol_type = unassigned DNA
atctgttgactcggggactt

SEQ ID NO: 25 - DNA, 20 bp, Felis catus
  source 1..20: mol_type = unassigned DNA
atcttcaaactgtttgcact

SEQ ID NO: 26 - DNA, 20 bp, Felis catus
  source 1..20: mol_type = unassigned DNA
atgaaggtctttcaaaaggg

SEQ ID NO: 27 - DNA, 20 bp, Felis catus
  source 1..20: mol_type = unassigned DNA
atggaaggggaggggagggg

SEQ ID NO: 28 - DNA, 20 bp, Felis catus
  source 1..20: mol_type = unassigned DNA
caaacctcagatagcttgaa

SEQ ID NO: 29 - DNA, 20 bp, Felis catus
  source 1..20: mol_type = unassigned DNA
cacagcaagtgtagggagtg

SEQ ID NO: 30 - DNA, 20 bp, Felis catus
  source 1..20: mol_type = unassigned DNA
caccccacccaaaggtgaga

SEQ ID NO: 31 - DNA, 20 bp, Felis catus
  source 1..20: mol_type = unassigned DNA
caccctcccatatgtgaccc

SEQ ID NO: 32 - DNA, 20 bp, Felis catus
  source 1..20: mol_type = unassigned DNA
cacctgccactgcatcatga

SEQ ID NO: 33 - DNA, 20 bp, Felis catus
  source 1..20: mol_type = unassigned DNA
cacttctgagcatggcggga

SEQ ID NO: 34 - DNA, 20 bp, Felis catus
  source 1..20: mol_type = unassigned DNA
cagagccctcaagacgggga

SEQ ID NO: 35 - DNA, 20 bp, Felis catus
  source 1..20: mol_type = unassigned DNA
cagcatgtaggggagggctc

SEQ ID NO: 36 - DNA, 20 bp, Felis catus
  source 1..20: mol_type = unassigned DNA
cagcatgtaggggagggttc

SEQ ID NO: 37 - DNA, 20 bp, Felis catus
  source 1..20: mol_type = unassigned DNA
catcacttggcctcagtgtc

SEQ ID NO: 38 - DNA, 20 bp, Felis catus
  source 1..20: mol_type = unassigned DNA
ccaagagagaggatgatgga

SEQ ID NO: 39 - DNA, 20 bp, Felis catus
  source 1..20: mol_type = unassigned DNA
ccaccagcttgggggtctgc

SEQ ID NO: 40 - DNA, 20 bp, Felis catus
  source 1..20: mol_type = unassigned DNA
ccaccggcttgggggtctgc

SEQ ID NO: 41 - DNA, 20 bp, Felis catus
  source 1..20: mol_type = unassigned DNA
ccatgaatcatatgcttgtt

SEQ ID NO: 42 - DNA, 20 bp, Felis catus
  source 1..20: mol_type = unassigned DNA
ccctggtccacagcaagtgt

SEQ ID NO: 43 - DNA, 20 bp, Felis catus
  source 1..20: mol_type = unassigned DNA
cccttccctgggaatctggg

SEQ ID NO: 44 - DNA, 20 bp, Felis catus
  source 1..20: mol_type = unassigned DNA
cctactgttgcagccacagc

SEQ ID NO: 45 - DNA, 20 bp, Felis catus
  source 1..20: mol_type = unassigned DNA
cctgatgaaggtctttcaaa

SEQ ID NO: 46 - DNA, 20 bp, Felis catus
  source 1..20: mol_type = unassigned DNA
cctgtctggggggtctgctc

SEQ ID NO: 47 - DNA, 20 bp, Felis catus
  source 1..20: mol_type = unassigned DNA
cgccatggctggggaagtag

SEQ ID NO: 48 - DNA, 20 bp, Felis catus
  source 1..20: mol_type = unassigned DNA
ctcaaatactgagagagagg

SEQ ID NO: 49 - DNA, 20 bp, Felis catus
  source 1..20: mol_type = unassigned DNA
ctcaagggaggccactgagc

SEQ ID NO: 50 - DNA, 20 bp, Felis catus
  source 1..20: mol_type = unassigned DNA
ctcctccctccacagccccc

SEQ ID NO: 51 - DNA, 20 bp, Felis catus
  source 1..20: mol_type = unassigned DNA
ctgagagagaggaggagggg

SEQ ID NO: 52 - DNA, 20 bp, Felis catus
  source 1..20: mol_type = unassigned DNA
ctggcggtgcctcctggaaa

SEQ ID NO: 53 - DNA, 20 bp, Felis catus
  source 1..20: mol_type = unassigned DNA
ctgtgatcattttggtgaag

SEQ ID NO: 54 - DNA, 20 bp, Felis catus
  source 1..20: mol_type = unassigned DNA
cttcattccctgggtcccag

SEQ ID NO: 55 - DNA, 20 bp, Felis catus
  source 1..20: mol_type = unassigned DNA
gaacctgggcaccagcatgt

SEQ ID NO: 56 - DNA, 20 bp, Felis catus
  source 1..20: mol_type = unassigned DNA
gacattggccatcattcggg

SEQ ID NO: 57 - DNA, 20 bp, Felis catus
  source 1..20: mol_type = unassigned DNA
gacccccagggtctggccgg

SEQ ID NO: 58 - DNA, 20 bp, Felis catus
  source 1..20: mol_type = unassigned DNA
gaggtgctattaaagtgacc

SEQ ID NO: 59 - DNA, 20 bp, Felis catus
  source 1..20: mol_type = unassigned DNA
gatattcctgtgtctgcctg

SEQ ID NO: 60 - DNA, 20 bp, Felis catus
  source 1..20: mol_type = unassigned DNA
gatatttctgtgtctgcctg

SEQ ID NO: 61 - DNA, 20 bp, Felis catus
  source 1..20: mol_type = unassigned DNA
gattatgacgaaggcagggc

SEQ ID NO: 62 - DNA, 20 bp, Felis catus
  source 1..20: mol_type = unassigned DNA
gcacgtcatggggacaggag

SEQ ID NO: 63 - DNA, 20 bp, Felis catus
  source 1..20: mol_type = unassigned DNA
gcactgcccccatggtagca

SEQ ID NO: 64 - DNA, 20 bp, Felis catus
  source 1..20: mol_type = unassigned DNA
gcagagcacacgacggtccc

SEQ ID NO: 65 - DNA, 20 bp, Felis catus
  source 1..20: mol_type = unassigned DNA
gcagccacagcaggtataaa

SEQ ID NO: 66 - DNA, 20 bp, Felis catus
  source 1..20: mol_type = unassigned DNA
gctattaaagtgaccaggtg

SEQ ID NO: 67 - DNA, 20 bp, Felis catus
  source 1..20: mol_type = unassigned DNA
ggaagaatgtgtcctgatga

SEQ ID NO: 68 - DNA, 20 bp, Felis catus
  source 1..20: mol_type = unassigned DNA
ggaggaggggaggggagaag

SEQ ID NO: 69 - DNA, 20 bp, Felis catus
  source 1..20: mol_type = unassigned DNA
ggaggccactgagcaggtca

SEQ ID NO: 70 - DNA, 20 bp, Felis catus
  source 1..20: mol_type = unassigned DNA
ggagtccagaggtcataagc

SEQ ID NO: 71 - DNA, 20 bp, Felis catus
  source 1..20: mol_type = unassigned DNA
ggatgatggaaggggagggg

SEQ ID NO: 72 - DNA, 20 bp, Felis catus
  source 1..20: mol_type = unassigned DNA
ggcccaccactctgaccccc

SEQ ID NO: 73 - DNA, 20 bp, Felis catus
  source 1..20: mol_type = unassigned DNA
ggcgtggtcaagaagcagaa

SEQ ID NO: 74 - DNA, 20 bp, Felis catus
  source 1..20: mol_type = unassigned DNA
ggctgaggaaaggttcccag

SEQ ID NO: 75 - DNA, 20 bp, Felis catus
  source 1..20: mol_type = unassigned DNA
gggcagggagggacgagggg

SEQ ID NO: 76 - DNA, 20 bp, Felis catus
  source 1..20: mol_type = unassigned DNA
gggcggggcagggagggacg

SEQ ID NO: 77 - DNA, 20 bp, Felis catus
  source 1..20: mol_type = unassigned DNA
ggggagaagaggggcggggc

SEQ ID NO: 78 - DNA, 20 bp, Felis catus
  source 1..20: mol_type = unassigned DNA
gggtctgctcagggcagtgc

SEQ ID NO: 79 - DNA, 20 bp, Felis catus
  source 1..20: mol_type = unassigned DNA
gtcacccagatgagtgggcc

SEQ ID NO: 80 - DNA, 20 bp, Felis catus
  source 1..20: mol_type = unassigned DNA
gtcatggggacaggagagga

SEQ ID NO: 81 - DNA, 20 bp, Felis catus
  source 1..20: mol_type = unassigned DNA
gtctgctgaacttacactgc

SEQ ID NO: 82 - DNA, 20 bp, Felis catus
  source 1..20: mol_type = unassigned DNA
gtgagggaggagagaatggc

SEQ ID NO: 83 - DNA, 20 bp, Felis catus
  source 1..20: mol_type = unassigned DNA
gtgaggggcaccccacccaa

SEQ ID NO: 84 - DNA, 20 bp, Felis catus
  source 1..20: mol_type = unassigned DNA
gtgagttcgagccccgcgtc

SEQ ID NO: 85 - DNA, 20 bp, Felis catus
  source 1..20: mol_type = unassigned DNA
gtggagcacgtcatggggac

SEQ ID NO: 86 - DNA, 20 bp, Felis catus
  source 1..20: mol_type = unassigned DNA
tacactgcagggcttccccc

SEQ ID NO: 87 - DNA, 20 bp, Felis catus
  source 1..20: mol_type = unassigned DNA
tagcttgaaaggtaaatatc

SEQ ID NO: 88 - DNA, 20 bp, Felis catus
  source 1..20: mol_type = unassigned DNA
tattaaagtgaccaggtgac

SEQ ID NO: 89 - DNA, 20 bp, Felis catus
  source 1..20: mol_type = unassigned DNA
tcaagctttggggctggccc

SEQ ID NO: 90 - DNA, 20 bp, Felis catus
  source 1..20: mol_type = unassigned DNA
tcaaggtcacatgtaatgac

SEQ ID NO: 91 - DNA, 20 bp, Felis catus
  source 1..20: mol_type = unassigned DNA
tcaggagactggctcaaggg

SEQ ID NO: 92 - DNA, 20 bp, Felis catus
  source 1..20: mol_type = unassigned DNA
tcattttggtgaagaggctg

SEQ ID NO: 93 - DNA, 20 bp, Felis catus
  source 1..20: mol_type = unassigned DNA
tctgctcagggcagtgcagg

SEQ ID NO: 94 - DNA, 20 bp, Felis catus
  source 1..20: mol_type = unassigned DNA
tctggggacacagattctcc

SEQ ID NO: 95 - DNA, 20 bp, Felis catus
  source 1..20: mol_type = unassigned DNA
tcttgatctggggtggaagt

SEQ ID NO: 96 - DNA, 20 bp, Felis catus
  source 1..20: mol_type = unassigned DNA
tgagcatggcgggaagggga

SEQ ID NO: 97 - DNA, 20 bp, Felis catus
  source 1..20: mol_type = unassigned DNA
tgatgcaaaaatgacagaag

SEQ ID NO: 98 - DNA, 20 bp, Felis catus
  source 1..20: mol_type = unassigned DNA
tgcctcaaatactgagagag

SEQ ID NO: 99 - DNA, 20 bp, Felis catus
  source 1..20: mol_type = unassigned DNA
tgcctcacataccaagagag

SEQ ID NO: 100 - DNA, 20 bp, Felis catus
  source 1..20: mol_type = unassigned DNA
tgggcaccagcatgtagggg

SEQ ID NO: 101 - DNA, 20 bp, Felis catus
  source 1..20: mol_type = unassigned DNA
tggtagcaaggggagtccag

SEQ ID NO: 102 - DNA, 20 bp, Felis catus
  source 1..20: mol_type = unassigned DNA
ttaagcgtccggcttcagcc

SEQ ID NO: 103 - DNA, 20 bp, Felis catus
  source 1..20: mol_type = unassigned DNA
ttctgagaagcagcccagag

SEQ ID NO: 104 - DNA, 20 bp, Felis catus
  source 1..20: mol_type = unassigned DNA
ttgagaccagaccatcttca

SEQ ID NO: 105 - DNA, 20 bp, Felis catus
  source 1..20: mol_type = unassigned DNA
ttggtgaagaggctgaggaa

SEQ ID NO: 106 - DNA, 20 bp, Felis catus
  source 1..20: mol_type = unassigned DNA
agcagcccagagaggcctgg

SEQ ID NO: 107 - DNA, 20 bp, Felis catus
  source 1..20: mol_type = unassigned DNA
aggggaggggagaagagggg

SEQ ID NO: 108 - DNA, 20 bp, Felis catus
  source 1..20: mol_type = unassigned DNA
agtgaccaggtgacaggact

SEQ ID NO: 109 - DNA, 20 bp, Felis catus
  source 1..20: mol_type = unassigned DNA
caggctctgggctgatggct

SEQ ID NO: 110 - DNA, 20 bp, Felis catus
  source 1..20: mol_type = unassigned DNA
cagggcacttctgagcatgg

SEQ ID NO: 111 - DNA, 20 bp, Felis catus
  source 1..20: mol_type = unassigned DNA
cttggacagagccctcaaga

SEQ ID NO: 112 - DNA, 20 bp, Felis catus
  source 1..20: mol_type = unassigned DNA
gaagcagtctggcttttcct

SEQ ID NO: 113 - DNA, 20 bp, Felis catus
  source 1..20: mol_type = unassigned DNA
gcagaaaagcagcaggtctt

SEQ ID NO: 114 - DNA, 20 bp, Felis catus
  source 1..20: mol_type = unassigned DNA
gctcaacgctgcttggccac

SEQ ID NO: 115 - DNA, 20 bp, Felis catus
  source 1..20: mol_type = unassigned DNA
ggcgcagtcggttaagcgtc

SEQ ID NO: 116 - DNA, 20 bp, Felis catus
  source 1..20: mol_type = unassigned DNA
ggctgacattggccatcatt

SEQ ID NO: 117 - DNA, 20 bp, Felis catus
  source 1..20: mol_type = unassigned DNA
gggcaggagccaccagagac

SEQ ID NO: 118 - DNA, 20 bp, Felis catus
  source 1..20: mol_type = unassigned DNA
gggcgcctgggtggcgcagt

SEQ ID NO: 119 - DNA, 20 bp, Felis catus
  source 1..20: mol_type = unassigned DNA
ggtagcgtcatctgttgact

SEQ ID NO: 120 - DNA, 20 bp, Felis catus
  source 1..20: mol_type = unassigned DNA
ggtgagaaggtgatgagcaa

SEQ ID NO: 121 - DNA, 20 bp, Felis catus
  source 1..20: mol_type = unassigned DNA
tcagccaggtcacgatctcg

SEQ ID NO: 122 - DNA, 20 bp, Felis catus
  source 1..20: mol_type = unassigned DNA
tctgacccccagggtctggc

SEQ ID NO: 123 - DNA, 20 bp, Felis catus
  source 1..20: mol_type = unassigned DNA
tggttacgcagagcacacga

SEQ ID NO: 124 - DNA, 20 bp, Felis catus
  source 1..20: mol_type = unassigned DNA
aaaagcagcaggtcttcggt

SEQ ID NO: 125 - DNA, 20 bp, Felis catus
  source 1..20: mol_type = unassigned DNA
aaagcagcaggtcttcggtg

SEQ ID NO: 126 - DNA, 20 bp, Felis catus
  source 1..20: mol_type = unassigned DNA
aaaggaagaagccagttggg

SEQ ID NO: 127 - DNA, 20 bp, Felis catus
  source 1..20: mol_type = unassigned DNA
aaagggttccaggctgggga

SEQ ID NO: 128 - DNA, 20 bp, Felis catus
  source 1..20: mol_type = unassigned DNA
aacctgggcaccagcatgta

SEQ ID NO: 129 - DNA, 20 bp, Felis catus
  source 1..20: mol_type = unassigned DNA
aagagagaggatgatggaag

SEQ ID NO: 130 - DNA, 20 bp, Felis catus
  source 1..20: mol_type = unassigned DNA
aagctgtcacccagatgagt

SEQ ID NO: 131 - DNA, 20 bp, Felis catus
  source 1..20: mol_type = unassigned DNA
aatactgagagagaggagga

SEQ ID NO: 132 - DNA, 20 bp, Felis catus
  source 1..20: mol_type = unassigned DNA
aatgctctcagcgtgctggt

SEQ ID NO: 133 - DNA, 20 bp, Felis catus
  source 1..20: mol_type = unassigned DNA
aatttgcccagccgtgaaga

SEQ ID NO: 134 - DNA, 20 bp, Felis catus
  source 1..20: mol_type = unassigned DNA
acagcaagtgtagggagtga

SEQ ID NO: 135 - DNA, 20 bp, Felis catus
  source 1..20: mol_type = unassigned DNA
accctcccatatgtgaccca

SEQ ID NO: 136 - DNA, 20 bp, Felis catus
  source 1..20: mol_type = unassigned DNA
acctgccactgcatcatgaa

SEQ ID NO: 137 - DNA, 20 bp, Felis catus
  source 1..20: mol_type = unassigned DNA
acctgggcaccagcatgtag

SEQ ID NO: 138 - DNA, 20 bp, Felis catus
  source 1..20: mol_type = unassigned DNA
actgcccccatggtagcaag

SEQ ID NO: 139 - DNA, 20 bp, Felis catus
  source 1..20: mol_type = unassigned DNA
acttctgagcatggcgggaa

SEQ ID NO: 140 - DNA, 20 bp, Felis catus
  source 1..20: mol_type = unassigned DNA
agactcgcacagaactccct

SEQ ID NO: 141 - DNA, 20 bp, Felis catus
  source 1..20: mol_type = unassigned DNA
agagccctcaagacggggaa

SEQ ID NO: 142 - DNA, 20 bp, Felis catus
  source 1..20: mol_type = unassigned DNA
agaggatgatggaaggggag

SEQ ID NO: 143 - DNA, 20 bp, Felis catus
  source 1..20: mol_type = unassigned DNA
agaggtcataagcaggttgt

SEQ ID NO: 144 - DNA, 20 bp, Felis catus
  source 1..20: mol_type = unassigned DNA
agcagaaaggagacccgtga

SEQ ID NO: 145 - DNA, 20 bp, Felis catus
  source 1..20: mol_type = unassigned DNA
agcatgtaggggagggctca

SEQ ID NO: 146 - DNA, 20 bp, Felis catus
  source 1..20: mol_type = unassigned DNA
agcatgtaggggagggttca

SEQ ID NO: 147 - DNA, 20 bp, Felis catus
  source 1..20: mol_type = unassigned DNA
agcctacccctcaagctttg

SEQ ID NO: 148 - DNA, 20 bp, Felis catus
  source 1..20: mol_type = unassigned DNA
aggagaaagacgccatggct

SEQ ID NO: 149 - DNA, 20 bp, Felis catus
  source 1..20: mol_type = unassigned DNA
aggaggggaggggagaagag

SEQ ID NO: 150 - DNA, 20 bp, Felis catus
  source 1..20: mol_type = unassigned DNA
agggcacttctgagcatggc

SEQ ID NO: 151 - DNA, 20 bp, Felis catus
  source 1..20: mol_type = unassigned DNA
atacatactgaaaagttctt

SEQ ID NO: 152 - DNA, 20 bp, Felis catus
  source 1..20: mol_type = unassigned DNA
atactgagagagaggaggag

SEQ ID NO: 153 - DNA, 20 bp, Felis catus
  source 1..20: mol_type = unassigned DNA
atgatggaaggggaggggag

SEQ ID NO: 154 - DNA, 20 bp, Felis catus
  source 1..20: mol_type = unassigned DNA
caaaggaagaagccagttgg

SEQ ID NO: 155 - DNA, 20 bp, Felis catus
  source 1..20: mol_type = unassigned DNA
caagagagaggatgatggaa

SEQ ID NO: 156 - DNA, 20 bp, Felis catus
  source 1..20: mol_type = unassigned DNA
cacagattatgacgaaggca

SEQ ID NO: 157 - DNA, 20 bp, Felis catus
  source 1..20: mol_type = unassigned DNA
cactgcccccatggtagcaa

SEQ ID NO: 158 - DNA, 20 bp, Felis catus
  source 1..20: mol_type = unassigned DNA
cagcaagtgtagggagtgag

SEQ ID NO: 159 - DNA, 20 bp, Felis catus
  source 1..20: mol_type = unassigned DNA
cagccacagcaggtataaaa

SEQ ID NO: 160 - DNA, 20 bp, Felis catus
  source 1..20: mol_type = unassigned DNA
cagcctacccctcaagcttt

SEQ ID NO: 161 - DNA, 20 bp, Felis catus
  source 1..20: mol_type = unassigned DNA
ccatggctggggaagtagag

SEQ ID NO: 162 - DNA, 20 bp, Felis catus
  source 1..20: mol_type = unassigned DNA
cctgccactgcatcatgaag

SEQ ID NO: 163 - DNA, 20 bp, Felis catus
  source 1..20: mol_type = unassigned DNA
cctggtccacagcaagtgta

SEQ ID NO: 164 - DNA, 20 bp, Felis catus
  source 1..20: mol_type = unassigned DNA
cgagccccgcgtcaggctct

SEQ ID NO: 165 - DNA, 20 bp, Felis catus
  source 1..20: mol_type = unassigned DNA
cgctgcttggccaccagctt

SEQ ID NO: 166 - DNA, 20 bp, Felis catus
  source 1..20: mol_type = unassigned DNA
cgctgcttggccaccggctt

SEQ ID NO: 167 - DNA, 20 bp, Felis catus
  source 1..20: mol_type = unassigned DNA
ctattaaagtgaccaggtga

SEQ ID NO: 168 - DNA, 20 bp, Felis catus
  source 1..20: mol_type = unassigned DNA
ctcaaaggaagaagccagtt

SEQ ID NO: 169 - DNA, 20 bp, Felis catus
  source 1..20: mol_type = unassigned DNA
ctcagggcagtgcaggaggg

SEQ ID NO: 170 - DNA, 20 bp, Felis catus
  source 1..20: mol_type = unassigned DNA
ctcatttgtcttcattccct

SEQ ID NO: 171 - DNA, 20 bp, Felis catus
  source 1..20: mol_type = unassigned DNA
ctccaccatggcccttccct

SEQ ID NO: 172 - DNA, 20 bp, Felis catus
  source 1..20: mol_type = unassigned DNA
ctctctgtggagcacgtcat

SEQ ID NO: 173 - DNA, 20 bp, Felis catus
  source 1..20: mol_type = unassigned DNA
ctgaggaaaggttcccagag

SEQ ID NO: 174 - DNA, 20 bp, Felis catus
  source 1..20: mol_type = unassigned DNA
ctgatgaaggtctttcaaaa

SEQ ID NO: 175 - DNA, 20 bp, Felis catus
  source 1..20: mol_type = unassigned DNA
ctgcagggcttcccccagga

SEQ ID NO: 176 - DNA, 20 bp, Felis catus
  source 1..20: mol_type = unassigned DNA
ctgccactgcatcatgaagg

SEQ ID NO: 177 - DNA, 20 bp, Felis catus
  source 1..20: mol_type = unassigned DNA
ctgctcagggcagtgcagga

SEQ ID NO: 178 - DNA, 20 bp, Felis catus
  source 1..20: mol_type = unassigned DNA
ctgcttggccaccagcttgg

SEQ ID NO: 179 - DNA, 20 bp, Felis catus
  source 1..20: mol_type = unassigned DNA
ctgcttggccaccggcttgg

SEQ ID NO: 180 - DNA, 20 bp, Felis catus
  source 1..20: mol_type = unassigned DNA
ctggggacacagattctcca

SEQ ID NO: 181 - DNA, 20 bp, Felis catus
  source 1..20: mol_type = unassigned DNA
ctgtctggggggtctgctca

SEQ ID NO: 182 - DNA, 20 bp, Felis catus
  source 1..20: mol_type = unassigned DNA
cttctgagcatggcgggaag

SEQ ID NO: 183 - DNA, 20 bp, Felis catus
  source 1..20: mol_type = unassigned DNA
cttgttaggaagagcctcct

SEQ ID NO: 184 - DNA, 20 bp, Felis catus
  source 1..20: mol_type = unassigned DNA
gaagaggggcggggcaggga

SEQ ID NO: 185 - DNA, 20 bp, Felis catus
  source 1..20: mol_type = unassigned DNA
gaagtagaggggatcatgtg

SEQ ID NO: 186 - DNA, 20 bp, Felis catus
  source 1..20: mol_type = unassigned DNA
gactcgcacagaactccctg

SEQ ID NO: 187 - DNA, 20 bp, Felis catus
  source 1..20: mol_type = unassigned DNA
gagagagaggaggaggggag

SEQ ID NO: 188 - DNA, 20 bp, Felis catus
  source 1..20: mol_type = unassigned DNA
gagaggatgatggaagggga

SEQ ID NO: 189 - DNA, 20 bp, Felis catus
  source 1..20: mol_type = unassigned DNA
gagcatggcgggaaggggaa

SEQ ID NO: 190 - DNA, 20 bp, Felis catus
  source 1..20: mol_type = unassigned DNA
gagccctcaagacggggaag

SEQ ID NO: 191 - DNA, 20 bp, Felis catus
  source 1..20: mol_type = unassigned DNA
gaggaggggaggggagaaga

SEQ ID NO: 192 - DNA, 20 bp, Felis catus
  source 1..20: mol_type = unassigned DNA
gaggtcataagcaggttgtg

SEQ ID NO: 193 - DNA, 20 bp, Felis catus
  source 1..20: mol_type = unassigned DNA
gagtccactagctaagcact

SEQ ID NO: 194 - DNA, 20 bp, Felis catus
  source 1..20: mol_type = unassigned DNA
gatgatggaaggggagggga

SEQ ID NO: 195 - DNA, 20 bp, Felis catus
  source 1..20: mol_type = unassigned DNA
gatgttgacctattcctgat

SEQ ID NO: 196 - DNA, 20 bp, Felis catus
  source 1..20: mol_type = unassigned DNA
gattcaggagactggctcaa

SEQ ID NO: 197 - DNA, 20 bp, Felis catus
  source 1..20: mol_type = unassigned DNA
gccatggctggggaagtaga

SEQ ID NO: 198 - DNA, 20 bp, Felis catus
  source 1..20: mol_type = unassigned DNA
gcccaccactctgaccccca

SEQ ID NO: 199 - DNA, 20 bp, Felis catus
  source 1..20: mol_type = unassigned DNA
gcctctgacgcctgtctggg

SEQ ID NO: 200 - DNA, 20 bp, Felis catus
  source 1..20: mol_type = unassigned DNA
gcggggcagggagggacgag

SEQ ID NO: 201 - DNA, 20 bp, Felis catus
  source 1..20: mol_type = unassigned DNA
gctcagggcagtgcaggagg

SEQ ID NO: 202 - DNA, 20 bp, Felis catus
  source 1..20: mol_type = unassigned DNA
gctgacattggccatcattc

SEQ ID NO: 203 - DNA, 20 bp, Felis catus
  source 1..20: mol_type = unassigned DNA
gctgaggaaaggttcccaga

SEQ ID NO: 204 - DNA, 20 bp, Felis catus
  source 1..20: mol_type = unassigned DNA
gctgccttgctcttgatctg

SEQ ID NO: 205 - DNA, 20 bp, Felis catus
  source 1..20: mol_type = unassigned DNA
gctgcttggccaccagcttg

SEQ ID NO: 206 - DNA, 20 bp, Felis catus
  source 1..20: mol_type = unassigned DNA
gctgcttggccaccggcttg

SEQ ID NO: 207 - DNA, 20 bp, Felis catus
  source 1..20: mol_type = unassigned DNA
ggaaggggaggggaggggag

SEQ ID NO: 208 - DNA, 20 bp, Felis catus
  source 1..20: mol_type = unassigned DNA
ggaagtagaggggatcatgt

SEQ ID NO: 209 - DNA, 20 bp, Felis catus
  source 1..20: mol_type = unassigned DNA
ggacgaggggaggtgagatg

SEQ ID NO: 210 - DNA, 20 bp, Felis catus
  source 1..20: mol_type = unassigned DNA
ggagaaagacgccatggctg

SEQ ID NO: 211 - DNA, 20 bp, Felis catus
  source 1..20: mol_type = unassigned DNA
ggcggggcagggagggacga

SEQ ID NO: 212 - DNA, 20 bp, Felis catus
  source 1..20: mol_type = unassigned DNA
ggctgccttgctcttgatct

SEQ ID NO: 213 - DNA, 20 bp, Felis catus
  source 1..20: mol_type = unassigned DNA
gggacgaggggaggtgagat

SEQ ID NO: 214 - DNA, 20 bp, Felis catus
  source 1..20: mol_type = unassigned DNA
gggagaagaggggcggggca

SEQ ID NO: 215 - DNA, 20 bp, Felis catus
  source 1..20: mol_type = unassigned DNA
gggaggggagaagaggggcg

SEQ ID NO: 216 - DNA, 20 bp, Felis catus
  source 1..20: mol_type = unassigned DNA
gggcaccagcatgtagggga

SEQ ID NO: 217 - DNA, 20 bp, Felis catus
  source 1..20: mol_type = unassigned DNA
ggggaggggagaagaggggc

SEQ ID NO: 218 - DNA, 20 bp, Felis catus
  source 1..20: mol_type = unassigned DNA
ggggttctaacaccttccca

SEQ ID NO: 219 - DNA, 20 bp, Felis catus
  source 1..20: mol_type = unassigned DNA
ggtaaatatcaggaacctaa

SEQ ID NO: 220 - DNA, 20 bp, Felis catus
  source 1..20: mol_type = unassigned DNA
gtagcgtcatctgttgactc

SEQ ID NO: 221 - DNA, 20 bp, Felis catus
  source 1..20: mol_type = unassigned DNA
gtataaaagggttccaggct

SEQ ID NO: 222 - DNA, 20 bp, Felis catus
  source 1..20: mol_type = unassigned DNA
gtctgggacatgagtgtctg

SEQ ID NO: 223 - DNA, 20 bp, Felis catus
  source 1..20: mol_type = unassigned DNA
gtgagaaggtgatgagcaac

SEQ ID NO: 224 - DNA, 20 bp, Felis catus
  source 1..20: mol_type = unassigned DNA
gtgcctctgacgcctgtctg

SEQ ID NO: 225 - DNA, 20 bp, Felis catus
  source 1..20: mol_type = unassigned DNA
tagcgtcatctgttgactcg

SEQ ID NO: 226 - DNA, 20 bp, Felis catus
  source 1..20: mol_type = unassigned DNA
tataaaagggttccaggctg

SEQ ID NO: 227 - DNA, 20 bp, Felis catus
  source 1..20: mol_type = unassigned DNA
tattaaagtgaccaggtgag

SEQ ID NO: 228 - DNA, 20 bp, Felis catus
  source 1..20: mol_type = unassigned DNA
tcaaaggaagaagccagttg

SEQ ID NO: 229 - DNA, 20 bp, Felis catus
  source 1..20: mol_type = unassigned DNA
tcaagagacgactagaacct

SEQ ID NO: 230 - DNA, 20 bp, Felis catus
  source 1..20: mol_type = unassigned DNA
tcattcgggaggcctgactt

SEQ ID NO: 231 - DNA, 20 bp, Felis catus
  source 1..20: mol_type = unassigned DNA
tcgtgttctcgtgcttctct

SEQ ID NO: 232 - DNA, 20 bp, Felis catus
  source 1..20: mol_type = unassigned DNA
tctctgtggagcacgtcatg

SEQ ID NO: 233 - DNA, 20 bp, Felis catus
  source 1..20: mol_type = unassigned DNA
tctgctgaacttacactgca

SEQ ID NO: 234 - DNA, 20 bp, Felis catus
  source 1..20: mol_type = unassigned DNA
tgaaggtctttcaaaaggga

SEQ ID NO: 235 - DNA, 20 bp, Felis catus
  source 1..20: mol_type = unassigned DNA
tgaccaggtgaggggcgcct

SEQ ID NO: 236 - DNA, 20 bp, Felis catus
  source 1..20: mol_type = unassigned DNA
tgagagagaggaggagggga

SEQ ID NO: 237 - DNA, 20 bp, Felis catus
  source 1..20: mol_type = unassigned DNA
tgcagggcttcccccaggag

SEQ ID NO: 238 - DNA, 20 bp, Felis catus
  source 1..20: mol_type = unassigned DNA
tgcctctgacgcctgtctgg

SEQ ID NO: 239 - DNA, 20 bp, Felis catus
  source 1..20: mol_type = unassigned DNA
tgctcagggcagtgcaggag

SEQ ID NO: 240 - DNA, 20 bp, Felis catus
  source 1..20: mol_type = unassigned DNA
tggaaggggaggggagggga

SEQ ID NO: 241 - DNA, 20 bp, Felis catus
  source 1..20: mol_type = unassigned DNA
tggacagagccctcaagacg

SEQ ID NO: 242 - DNA, 20 bp, Felis catus
  source 1..20: mol_type = unassigned DNA
tggcccttccctgggaatct

SEQ ID NO: 243 - DNA, 20 bp, Felis catus
  source 1..20: mol_type = unassigned DNA
tggggacacagattctccag

SEQ ID NO: 244 - DNA, 20 bp, Felis catus
  source 1..20: mol_type = unassigned DNA
tggggtggaagtaggtgtct

SEQ ID NO: 245 - DNA, 20 bp, Felis catus
  source 1..20: mol_type = unassigned DNA
tgtctgggacatgagtgtct

SEQ ID NO: 246 - DNA, 20 bp, Felis catus
  source 1..20: mol_type = unassigned DNA
tgtgcctctgacgcctgtct

SEQ ID NO: 247 - DNA, 20 bp, Felis catus
  source 1..20: mol_type = unassigned DNA
ttcattccctgggtcccaga

SEQ ID NO: 248 - DNA, 20 bp, Felis catus
  source 1..20: mol_type = unassigned DNA
ttggacagagccctcaagac

SEQ ID NO: 249 - DNA, 20 bp, Felis catus
  source 1..20: mol_type = unassigned DNA
aaagctgtcacccagatgag

SEQ ID NO: 250 - DNA, 20 bp, Felis catus
  source 1..20: mol_type = unassigned DNA
aacagctcgtgcaaaggccc

SEQ ID NO: 251 - DNA, 20 bp, Felis catus
  source 1..20: mol_type = unassigned DNA
aatttcagttctgaaattac

SEQ ID NO: 252 - DNA, 20 bp, Felis catus
  source 1..20: mol_type = unassigned DNA
accagagaccggcctccttt

SEQ ID NO: 253 - DNA, 20 bp, Felis catus
  source 1..20: mol_type = unassigned DNA
acccgtgagggaggagagaa

SEQ ID NO: 254 - DNA, 20 bp, Felis catus
  source 1..20: mol_type = unassigned DNA
accttgcccagagtgagacc

SEQ ID NO: 255 - DNA, 20 bp, Felis catus
  source 1..20: mol_type = unassigned DNA
acgctgcttggccaccagct

SEQ ID NO: 256 - DNA, 20 bp, Felis catus
  source 1..20: mol_type = unassigned DNA
acgctgcttggccaccggct

SEQ ID NO: 257 - DNA, 20 bp, Felis catus
  source 1..20: mol_type = unassigned DNA
actcaaaggaagaagccagt

SEQ ID NO: 258 - DNA, 20 bp, Felis catus
  source 1..20: mol_type = unassigned DNA
agaagcagcccagagaggcc

SEQ ID NO: 259 - DNA, 20 bp, Felis catus
  source 1..20: mol_type = unassigned DNA
agaggcctggcggtgcctcc

SEQ ID NO: 260 - DNA, 20 bp, Felis catus
  source 1..20: mol_type = unassigned DNA
agccccgccccacttccccg

SEQ ID NO: 261 - DNA, 20 bp, Felis catus
  source 1..20: mol_type = unassigned DNA
aggaagagcctcctgggcag

SEQ ID NO: 262 - DNA, 20 bp, Felis catus
  source 1..20: mol_type = unassigned DNA
agggacgaggggaggtgaga

SEQ ID NO: 263 - DNA, 20 bp, Felis catus
  source 1..20: mol_type = unassigned DNA
atcattcgggaggcctgact

SEQ ID NO: 264 - DNA, 20 bp, Felis catus
  source 1..20: mol_type = unassigned DNA
atggcccttccctgggaatc

SEQ ID NO: 265 - DNA, 20 bp, Felis catus
  source 1..20: mol_type = unassigned DNA
atgtaatgacaggctgacat

SEQ ID NO: 266 - DNA, 20 bp, Felis catus
  source 1..20: mol_type = unassigned DNA
caatgcacgacctgtagtat

SEQ ID NO: 267 - DNA, 20 bp, Felis catus
  source 1..20: mol_type = unassigned DNA
cagaactccctggggactga

SEQ ID NO: 268 - DNA, 20 bp, Felis catus
  source 1..20: mol_type = unassigned DNA
cagaatcagattcaggagac

SEQ ID NO: 269 - DNA, 20 bp, Felis catus
  source 1..20: mol_type = unassigned DNA
cagaggtcataagcaggttg

SEQ ID NO: 270 - DNA, 20 bp, Felis catus
  source 1..20: mol_type = unassigned DNA
cagtgtcaggccctcagctc

SEQ ID NO: 271 - DNA, 20 bp, Felis catus
  source 1..20: mol_type = unassigned DNA
catacatactgaaaagttct

SEQ ID NO: 272 - DNA, 20 bp, Felis catus
  source 1..20: mol_type = unassigned DNA
cataccaagagagaggatga

SEQ ID NO: 273 - DNA, 20 bp, Felis catus
  source 1..20: mol_type = unassigned DNA
ccactctgacccccagggtc

SEQ ID NO: 274 - DNA, 20 bp, Felis catus
  source 1..20: mol_type = unassigned DNA
ccagagtgagacctggctct

SEQ ID NO: 275 - DNA, 20 bp, Felis catus
  source 1..20: mol_type = unassigned DNA
ccaggctgctcaacgctgct

SEQ ID NO: 276 - DNA, 20 bp, Felis catus
  source 1..20: mol_type = unassigned DNA
ccaggtgaggggcgcctggg

SEQ ID NO: 277 - DNA, 20 bp, Felis catus
  source 1..20: mol_type = unassigned DNA
cccaggccacagaagcagtc

SEQ ID NO: 278 - DNA, 20 bp, Felis catus
  source 1..20: mol_type = unassigned DNA
cctcatttgtcttcattccc

SEQ ID NO: 279 - DNA, 20 bp, Felis catus
  source 1..20: mol_type = unassigned DNA
cctgtgtccctggcatcact

SEQ ID NO: 280 - DNA, 20 bp, Felis catus
  source 1..20: mol_type = unassigned DNA
cgcgtcaggctctgggctga

SEQ ID NO: 281 - DNA, 20 bp, Felis catus
  source 1..20: mol_type = unassigned DNA
ctcatgtttgttctccacca

SEQ ID NO: 282 - DNA, 20 bp, Felis catus
  source 1..20: mol_type = unassigned DNA
ctcgtgcaaaggccctggcg

SEQ ID NO: 283 - DNA, 20 bp, Felis catus
  source 1..20: mol_type = unassigned DNA
ctcgtgttctcgtgcttctc

SEQ ID NO: 284 - DNA, 20 bp, Felis catus
  source 1..20: mol_type = unassigned DNA
ctgatggcacctatgacatc

SEQ ID NO: 285 - DNA, 20 bp, Felis catus
  source 1..20: mol_type = unassigned DNA
ctgccttccaaacagccaga

SEQ ID NO: 286 - DNA, 20 bp, Felis catus
  source 1..20: mol_type = unassigned DNA
ctgggaggagaaagacgcca

SEQ ID NO: 287 - DNA, 20 bp, Felis catus
  source 1..20: mol_type = unassigned DNA
ctggggtggaagtaggtgtc

SEQ ID NO: 288 - DNA, 20 bp, Felis catus
  source 1..20: mol_type = unassigned DNA
ctgtgcctctgacgcctgtc

SEQ ID NO: 289 - DNA, 20 bp, Felis catus
  source 1..20: mol_type = unassigned DNA
gaaaagcagcaggtcttcgg

SEQ ID NO: 290 - DNA, 20 bp, Felis catus
  source 1..20: mol_type = unassigned DNA
gaaatggagcactgccccca

SEQ ID NO: 291 - DNA, 20 bp, Felis catus
  source 1..20: mol_type = unassigned DNA
gaatgctctcagcgtgctgg

SEQ ID NO: 292 - DNA, 20 bp, Felis catus
  source 1..20: mol_type = unassigned DNA
gagacctggctcttggccta

SEQ ID NO: 293 - DNA, 20 bp, Felis catus
  source 1..20: mol_type = unassigned DNA
gaggagaaagacgccatggc

SEQ ID NO: 294 - DNA, 20 bp, Felis catus
  source 1..20: mol_type = unassigned DNA
gcaggtcttcggtggggcgc

SEQ ID NO: 295 - DNA, 20 bp, Felis catus
  source 1..20: mol_type = unassigned DNA
gccggaggctacttctgaaa

SEQ ID NO: 296 - DNA, 20 bp, Felis catus
  source 1..20: mol_type = unassigned DNA
gcctctccagcacgtgagac

SEQ ID NO: 297 - DNA, 20 bp, Felis catus
  source 1..20: mol_type = unassigned DNA
gccttgctcttgatctgggg

SEQ ID NO: 298 - DNA, 20 bp, Felis catus
  source 1..20: mol_type = unassigned DNA
gcttgttaggaagagcctcc

SEQ ID NO: 299 - DNA, 20 bp, Felis catus
  source 1..20: mol_type = unassigned DNA
ggagaatgctctcagcgtgc

SEQ ID NO: 300 - DNA, 20 bp, Felis catus
  source 1..20: mol_type = unassigned DNA
ggatgttgacctattcctga

SEQ ID NO: 301 - DNA, 20 bp, Felis catus
  source 1..20: mol_type = unassigned DNA
gggaagtagaggggatcatg

SEQ ID NO: 302 - DNA, 20 bp, Felis catus
  source 1..20: mol_type = unassigned DNA
gggctgccttgctcttgatc

SEQ ID NO: 303 - DNA, 20 bp, Felis catus
  source 1..20: mol_type = unassigned DNA
gggtatctctgtgatcattt

SEQ ID NO: 304 - DNA, 20 bp, Felis catus
  source 1..20: mol_type = unassigned DNA
ggtataaaagggttccaggc

SEQ ID NO: 305 - DNA, 20 bp, Felis catus
  source 1..20: mol_type = unassigned DNA
gtcaagagacgactagaacc

SEQ ID NO: 306 - DNA, 20 bp, Felis catus
  source 1..20: mol_type = unassigned DNA
gtgaccaggtgaggggcgcc

SEQ ID NO: 307 - DNA, 20 bp, Felis catus
  source 1..20: mol_type = unassigned DNA
gtgtctgggacatgagtgtc

SEQ ID NO: 308 - DNA, 20 bp, Felis catus
  source 1..20: mol_type = unassigned DNA
tacccctcaagctttggggc

SEQ ID NO: 309 - DNA, 20 bp, Felis catus
  source 1..20: mol_type = unassigned DNA
tactggtgtcagctgacact

SEQ ID NO: 310 - DNA, 20 bp, Felis catus
  source 1..20: mol_type = unassigned DNA
tagactcgcacagaactccc

SEQ ID NO: 311 - DNA, 20 bp, Felis catus
  source 1..20: mol_type = unassigned DNA
tcagcctacccctcaagctt

SEQ ID NO: 312 - DNA, 20 bp, Felis catus
  source 1..20: mol_type = unassigned DNA
tcatagatgaagactcaccc

SEQ ID NO: 313 - DNA, 20 bp, Felis catus
  source 1..20: mol_type = unassigned DNA
tcccagggcacttctgagca

SEQ ID NO: 314 - DNA, 20 bp, Felis catus
  source 1..20: mol_type = unassigned DNA
tcgagccccgcgtcaggctc

SEQ ID NO: 315 - DNA, 20 bp, Felis catus
  source 1..20: mol_type = unassigned DNA
tctccaccatggcccttccc

SEQ ID NO: 316 - DNA, 20 bp, Felis catus
  source 1..20: mol_type = unassigned DNA
tctctctctctctctctctg

SEQ ID NO: 317 - DNA, 20 bp, Felis catus
  source 1..20: mol_type = unassigned DNA
tctctctgtggagcacgtca

SEQ ID NO: 318 - DNA, 20 bp, Felis catus
  source 1..20: mol_type = unassigned DNA
tctgtgtaatccctcccctc

SEQ ID NO: 319 - DNA, 20 bp, Felis catus
  source 1..20: mol_type = unassigned DNA
tgacaaatatgttgagcaag

SEQ ID NO: 320 - DNA, 20 bp, Felis catus
  source 1..20: mol_type = unassigned DNA
tgagtccactagctaagcac

SEQ ID NO: 321 - DNA, 20 bp, Felis catus
  source 1..20: mol_type = unassigned DNA
tgcaggccctcctgtgtccc

SEQ ID NO: 322 - DNA, 20 bp, Felis catus
  source 1..20: mol_type = unassigned DNA
tgggctgatggctcggagcc

SEQ ID NO: 323 - DNA, 20 bp, Felis catus
  source 1..20: mol_type = unassigned DNA
ttgtatctccagagagataa

SEQ ID NO: 324 - DNA, 20 bp, Felis catus
  source 1..20: mol_type = unassigned DNA
accccccagacaggcgtcag

SEQ ID NO: 325 - DNA, 20 bp, Felis catus
  source 1..20: mol_type = unassigned DNA
acgagctgttgccactgccc

SEQ ID NO: 326 - DNA, 20 bp, Felis catus
  source 1..20: mol_type = unassigned DNA
acttgaggagttaagagaaa

SEQ ID NO: 327 - DNA, 20 bp, Felis catus
  source 1..20: mol_type = unassigned DNA
acttgctcaacatatttgtc

SEQ ID NO: 328 - DNA, 20 bp, Felis catus
  source 1..20: mol_type = unassigned DNA
agaaagcgtccagatgtcat

SEQ ID NO: 329 - DNA, 20 bp, Felis catus
  source 1..20: mol_type = unassigned DNA
agaatggccctctgggaccc

SEQ ID NO: 330 - DNA, 20 bp, Felis catus
  source 1..20: mol_type = unassigned DNA
agacagagcatgagcagggg

SEQ ID NO: 331 - DNA, 20 bp, Felis catus
  source 1..20: mol_type = unassigned DNA
agatcaaaagcgtcaccctt

SEQ ID NO: 332 - DNA, 20 bp, Felis catus
  source 1..20: mol_type = unassigned DNA
agccccaaagcttgaggggt

SEQ ID NO: 333 - DNA, 20 bp, Felis catus
  source 1..20: mol_type = unassigned DNA
agctagcaagtaccaaaagg

SEQ ID NO: 334 - DNA, 20 bp, Felis catus
  source 1..20: mol_type = unassigned DNA
agctgttgccactgcccagg

SEQ ID NO: 335 - DNA, 20 bp, Felis catus
  source 1..20: mol_type = unassigned DNA
aggaactgacgtttggagat

SEQ ID NO: 336 - DNA, 20 bp, Felis catus
  source 1..20: mol_type = unassigned DNA
agtcaggaaggccagagctg

SEQ ID NO: 337 - DNA, 20 bp, Felis catus
  source 1..20: mol_type = unassigned DNA
agtgatgccagggacacagg

SEQ ID NO: 338 - DNA, 20 bp, Felis catus
  source 1..20: mol_type = unassigned DNA
atagcacctcaggcagacac

SEQ ID NO: 339 - DNA, 20 bp, Felis catus
  source 1..20: mol_type = unassigned DNA
atcctctctcttggtatgtg

SEQ ID NO: 340 - DNA, 20 bp, Felis catus
  source 1..20: mol_type = unassigned DNA
atttgtcaggggttcccatc

SEQ ID NO: 341 - DNA, 20 bp, Felis catus
  source 1..20: mol_type = unassigned DNA
caacagtagggcagggtggg

SEQ ID NO: 342 - DNA, 20 bp, Felis catus
  source 1..20: mol_type = unassigned DNA
cacagctagcaagtaccaaa

SEQ ID NO: 343 - DNA, 20 bp, Felis catus
  source 1..20: mol_type = unassigned DNA
caccctgggtcacatatggg

SEQ ID NO: 344 - DNA, 20 bp, Felis catus
  source 1..20: mol_type = unassigned DNA
cactgaggccaagtgatgcc

SEQ ID NO: 345 - DNA, 20 bp, Felis catus
  source 1..20: mol_type = unassigned DNA
cagaatcggaaacaggctcc

SEQ ID NO: 346 - DNA, 20 bp, Felis catus
  source 1..20: mol_type = unassigned DNA
cagaatggcagggcaggggg

SEQ ID NO: 347 - DNA, 20 bp, Felis catus
  source 1..20: mol_type = unassigned DNA
cagccatctggctgtttgga

SEQ ID NO: 348 - DNA, 20 bp, Felis catus
  source 1..20: mol_type = unassigned DNA
caggggaggggcagagagag

SEQ ID NO: 349 - DNA, 20 bp, Felis catus
  source 1..20: mol_type = unassigned DNA
caggggttcccatcaggaat

SEQ ID NO: 350 - DNA, 20 bp, Felis catus
  source 1..20: mol_type = unassigned DNA
cataggtgccatcagtcccc

SEQ ID NO: 351 - DNA, 20 bp, Felis catus
  source 1..20: mol_type = unassigned DNA
catatgggagggtgatgaga

SEQ ID NO: 352 - DNA, 20 bp, Felis catus
  source 1..20: mol_type = unassigned DNA
ccaagtgatgccagggacac

SEQ ID NO: 353 - DNA, 20 bp, Felis catus
  source 1..20: mol_type = unassigned DNA
ccagggaatgaagacaaatg

SEQ ID NO: 354 - DNA, 20 bp, Felis catus
  source 1..20: mol_type = unassigned DNA
ccccttcatgatgcagtggc

SEQ ID NO: 355 - DNA, 20 bp, Felis catus
  source 1..20: mol_type = unassigned DNA
ccctacacttgctgtggacc

SEQ ID NO: 356 - DNA, 20 bp, Felis catus
  source 1..20: mol_type = unassigned DNA
cctgagcagaccccccagac

SEQ ID NO: 357 - DNA, 20 bp, Felis catus
  source 1..20: mol_type = unassigned DNA
cctgctgtggctgcaacagt

SEQ ID NO: 358 - DNA, 20 bp, Felis catus
  source 1..20: mol_type = unassigned DNA
ccttttgaaagaccttcatc

SEQ ID NO: 359 - DNA, 20 bp, Felis catus
  source 1..20: mol_type = unassigned DNA
ctcctctctctcagtatttg

SEQ ID NO: 360 - DNA, 20 bp, Felis catus
  source 1..20: mol_type = unassigned DNA
ctctctggagatacaatccg

SEQ ID NO: 361 - DNA, 20 bp, Felis catus
  source 1..20: mol_type = unassigned DNA
ctggcatttgccaatactac

SEQ ID NO: 362 - DNA, 20 bp, Felis catus
  source 1..20: mol_type = unassigned DNA
cttaaccgactgcgccaccc

SEQ ID NO: 363 - DNA, 20 bp, Felis catus
  source 1..20: mol_type = unassigned DNA
ctttctcctcccagattccc

SEQ ID NO: 364 - DNA, 20 bp, Felis catus
  source 1..20: mol_type = unassigned DNA
cttttccaggaggcaccgcc

SEQ ID NO: 365 - DNA, 20 bp, Felis catus
  source 1..20: mol_type = unassigned DNA
gaactgcctgggggctgtgg

SEQ ID NO: 366 - DNA, 20 bp, Felis catus
  source 1..20: mol_type = unassigned DNA
gagagagacagagcatgagc

SEQ ID NO: 367 - DNA, 20 bp, Felis catus
  source 1..20: mol_type = unassigned DNA
gagctgagggcctgacactg

SEQ ID NO: 368 - DNA, 20 bp, Felis catus
  source 1..20: mol_type = unassigned DNA
gaggagatgtatgtgtgggc

SEQ ID NO: 369 - DNA, 20 bp, Felis catus
  source 1..20: mol_type = unassigned DNA
gaggcacagaatggcagggc

SEQ ID NO: 370 - DNA, 20 bp, Felis catus
  source 1..20: mol_type = unassigned DNA
gcaagagagtctcccaagtc

SEQ ID NO: 371 - DNA, 20 bp, Felis catus
  source 1..20: mol_type = unassigned DNA
gccaggtctcactctgggca

SEQ ID NO: 372 - DNA, 20 bp, Felis catus
  source 1..20: mol_type = unassigned DNA
gctgtttggaaggcagccag

SEQ ID NO: 373 - DNA, 20 bp, Felis catus
  source 1..20: mol_type = unassigned DNA
ggagacacagaatcggaaac

SEQ ID NO: 374 - DNA, 20 bp, Felis catus
  source 1..20: mol_type = unassigned DNA
ggctccccttccccgtcttg

SEQ ID NO: 375 - DNA, 20 bp, Felis catus
  source 1..20: mol_type = unassigned DNA
gggctggttgtgtcttggtg

SEQ ID NO: 376 - DNA, 20 bp, Felis catus
  source 1..20: mol_type = unassigned DNA
ggggtggaatatggaacttg

SEQ ID NO: 377 - DNA, 20 bp, Felis catus
  source 1..20: mol_type = unassigned DNA
gggtcagagtggtgggccat

SEQ ID NO: 378 - DNA, 20 bp, Felis catus
  source 1..20: mol_type = unassigned DNA
ggtcactttaatagcacctc

SEQ ID NO: 379 - DNA, 20 bp, Felis catus
  source 1..20: mol_type = unassigned DNA
gtctaacatccttttccagg

SEQ ID NO: 380 - DNA, 20 bp, Felis catus
  source 1..20: mol_type = unassigned DNA
gtgctggagaggctggagtc

SEQ ID NO: 381 - DNA, 20 bp, Felis catus
  source 1..20: mol_type = unassigned DNA
tatgtgaggcacagaatggc

SEQ ID NO: 382 - DNA, 20 bp, Felis catus
  source 1..20: mol_type = unassigned DNA
tccaccccagatcaagagca

SEQ ID NO: 383 - DNA, 20 bp, Felis catus
  source 1..20: mol_type = unassigned DNA
tccagtctcacgtgctggag

SEQ ID NO: 384 - DNA, 20 bp, Felis catus
  source 1..20: mol_type = unassigned DNA
tcccctacatgctggtgccc

SEQ ID NO: 385 - DNA, 20 bp, Felis catus
  source 1..20: mol_type = unassigned DNA
tcctcccagattcccaggga

SEQ ID NO: 386 - DNA, 20 bp, Felis catus
  source 1..20: mol_type = unassigned DNA
tctcaacttacggatttttc

SEQ ID NO: 387 - DNA, 20 bp, Felis catus
  source 1..20: mol_type = unassigned DNA
tcttttctgggggagtgctc

SEQ ID NO: 388 - DNA, 20 bp, Felis catus
  source 1..20: mol_type = unassigned DNA
tgcctgggggctgtggaggg

SEQ ID NO: 389 - DNA, 20 bp, Felis catus
  source 1..20: mol_type = unassigned DNA
tgcgtctaacatccttttcc

SEQ ID NO: 390 - DNA, 20 bp, Felis catus
  source 1..20: mol_type = unassigned DNA
tgctcagaagtgccctggga

SEQ ID NO: 391 - DNA, 20 bp, Felis catus
  source 1..20: mol_type = unassigned DNA
tggagaggctggagtcagga

SEQ ID NO: 392 - DNA, 20 bp, Felis catus
  source 1..20: mol_type = unassigned DNA
tgggccagccccaaagcttg

SEQ ID NO: 393 - DNA, 20 bp, Felis catus
  source 1..20: mol_type = unassigned DNA
tgggccataggccaagagcc

SEQ ID NO: 394 - DNA, 20 bp, Felis catus
  source 1..20: mol_type = unassigned DNA
tgtggctgcaacagtagggc

SEQ ID NO: 395 - DNA, 20 bp, Felis catus
  source 1..20: mol_type = unassigned DNA
ttctgcttcttgaccacgcc

SEQ ID NO: 396 - DNA, 20 bp, Felis catus
  source 1..20: mol_type = unassigned DNA
ttgcatcaacgcagttcttc

SEQ ID NO: 397 - DNA, 20 bp, Felis catus
  source 1..20: mol_type = unassigned DNA
ttggaaggcagccagagggg

SEQ ID NO: 398 - DNA, 20 bp, Felis catus
  source 1..20: mol_type = unassigned DNA
tttacctttcaagctatctg

SEQ ID NO: 399 - DNA, 20 bp, Felis catus
  source 1..20: mol_type = unassigned DNA
tttcagaactgaaattttct

SEQ ID NO: 400 - DNA, 20 bp, Felis catus
  source 1..20: mol_type = unassigned DNA
tttctaggttgactggggaa

SEQ ID NO: 401 - DNA, 20 bp, Felis catus
  source 1..20: mol_type = unassigned DNA
agcaagtaccaaaaggaggc

SEQ ID NO: 402 - DNA, 20 bp, Felis catus
  source 1..20: mol_type = unassigned DNA
cagaccacggggaagtgggg

SEQ ID NO: 403 - DNA, 20 bp, Felis catus
  source 1..20: mol_type = unassigned DNA
catcagcccagagcctgacg

SEQ ID NO: 404 - DNA, 20 bp, Felis catus
  source 1..20: mol_type = unassigned DNA
gagagagggagacacagaat

SEQ ID NO: 405 - DNA, 20 bp, Felis catus
  source 1..20: mol_type = unassigned DNA
gatcgtgacctggctgaagc

SEQ ID NO: 406 - DNA, 20 bp, Felis catus
  source 1..20: mol_type = unassigned DNA
gatggtctggtctcaactta

SEQ ID NO: 407 - DNA, 20 bp, Felis catus
  source 1..20: mol_type = unassigned DNA
ggcgaatttaggtcagacca

SEQ ID NO: 408 - DNA, 20 bp, Felis catus
  source 1..20: mol_type = unassigned DNA
gggcctgcagacccccaagc

SEQ ID NO: 409 - DNA, 20 bp, Felis catus
  source 1..20: mol_type = unassigned DNA
taggtcaacatccctcttca

SEQ ID NO: 410 - DNA, 20 bp, Felis catus
  source 1..20: mol_type = unassigned DNA
tccatttcagaagtagcctc

SEQ ID NO: 411 - DNA, 20 bp, Felis catus
  source 1..20: mol_type = unassigned DNA
tgacgcggggctcgaactca

SEQ ID NO: 412 - DNA, 20 bp, Felis catus
  source 1..20: mol_type = unassigned DNA
tgccattctctcctccctca

SEQ ID NO: 413 - DNA, 20 bp, Felis catus
  source 1..20: mol_type = unassigned DNA
aaatgagggtttttttttgg

SEQ ID NO: 414 - DNA, 20 bp, Felis catus
  source 1..20: mol_type = unassigned DNA
aacagtagggcagggtggga

SEQ ID NO: 415 - DNA, 20 bp, Felis catus
  source 1..20: mol_type = unassigned DNA
aactgcctgggggctgtgga

SEQ ID NO: 416 - DNA, 20 bp, Felis catus
  source 1..20: mol_type = unassigned DNA
aacttttcagtatgtatggt

SEQ ID NO: 417 - DNA, 20 bp, Felis catus
  source 1..20: mol_type = unassigned DNA
aagacctggcccactcatct

SEQ ID NO: 418 - DNA, 20 bp, Felis catus
  source 1..20: mol_type = unassigned DNA
aatgagggtttttttttggg

SEQ ID NO: 419 - DNA, 20 bp, Felis catus
  source 1..20: mol_type = unassigned DNA
acaaatgagggttttttttt

SEQ ID NO: 420 - DNA, 20 bp, Felis catus
  source 1..20: mol_type = unassigned DNA
acagagcatgagcaggggag

SEQ ID NO: 421 - DNA, 20 bp, Felis catus
  source 1..20: mol_type = unassigned DNA
accctgggggtcagagtggt

SEQ ID NO: 422 - DNA, 20 bp, Felis catus
  source 1..20: mol_type = unassigned DNA
accctgggtcacatatggga

SEQ ID NO: 423 - DNA, 20 bp, Felis catus
  source 1..20: mol_type = unassigned DNA
actgaggccaagtgatgcca

SEQ ID NO: 424 - DNA, 20 bp, Felis catus
  source 1..20: mol_type = unassigned DNA
acttttcagtatgtatggtg

SEQ ID NO: 425 - DNA, 20 bp, Felis catus
  source 1..20: mol_type = unassigned DNA
agaatggcagggcaggggga

SEQ ID NO: 426 - DNA, 20 bp, Felis catus
  source 1..20: mol_type = unassigned DNA
agaccacggggaagtggggc

SEQ ID NO: 427 - DNA, 20 bp, Felis catus
  source 1..20: mol_type = unassigned DNA
agagagacagagcatgagca

SEQ ID NO: 428 - DNA, 20 bp, Felis catus
  source 1..20: mol_type = unassigned DNA
agcctccggccagaccctgg

SEQ ID NO: 429 - DNA, 20 bp, Felis catus
  source 1..20: mol_type = unassigned DNA
aggcacagaatggcagggca

SEQ ID NO: 430 - DNA, 20 bp, Felis catus
  source 1..20: mol_type = unassigned DNA
aggcaccgccaggcctctct

SEQ ID NO: 431 - DNA, 20 bp, Felis catus
  source 1..20: mol_type = unassigned DNA
aggggaggggcagagagaga

SEQ ID NO: 432 - DNA, 20 bp, Felis catus
  source 1..20: mol_type = unassigned DNA
agggtttttttttggggggg

SEQ ID NO: 433 - DNA, 20 bp, Felis catus
  source 1..20: mol_type = unassigned DNA
aggtcagaccacggggaagt

SEQ ID NO: 434 - DNA, 20 bp, Felis catus
  source 1..20: mol_type = unassigned DNA
agtggtggaatatacaccct

SEQ ID NO: 435 - DNA, 20 bp, Felis catus
  source 1..20: mol_type = unassigned DNA
agttcagcagactcttttct

SEQ ID NO: 436 - DNA, 20 bp, Felis catus
  source 1..20: mol_type = unassigned DNA
atacaccctgggtcacatat

SEQ ID NO: 437 - DNA, 20 bp, Felis catus
  source 1..20: mol_type = unassigned DNA
ataggtgccatcagtcccca

SEQ ID NO: 438 - DNA, 20 bp, Felis catus
  source 1..20: mol_type = unassigned DNA
atatgggagggtgatgagaa

SEQ ID NO: 439 - DNA, 20 bp, Felis catus
  source 1..20: mol_type = unassigned DNA
atcacagagatacccctcct

SEQ ID NO: 440 - DNA, 20 bp, Felis catus
  source 1..20: mol_type = unassigned DNA
atcagcccagagcctgacgc

SEQ ID NO: 441 - DNA, 20 bp, Felis catus
  source 1..20: mol_type = unassigned DNA
atgagggtttttttttgggg

SEQ ID NO: 442 - DNA, 20 bp, Felis catus
  source 1..20: mol_type = unassigned DNA
atgtgaggcacagaatggca

SEQ ID NO: 443 - DNA, 20 bp, Felis catus
  source 1..20: mol_type = unassigned DNA
caaatgagggtttttttttg

SEQ ID NO: 444 - DNA, 20 bp, Felis catus
  source 1..20: mol_type = unassigned DNA
caacatccctcttcacggct

SEQ ID NO: 445 - DNA, 20 bp, Felis catus
  source 1..20: mol_type = unassigned DNA
caagagccaggtctcactct

SEQ ID NO: 446 - DNA, 20 bp, Felis catus
  source 1..20: mol_type = unassigned DNA
caagcagcgttgagcagcct

SEQ ID NO: 447 - DNA, 20 bp, Felis catus
  source 1..20: mol_type = unassigned DNA
cacagagatacccctcctgg

SEQ ID NO: 448 - DNA, 20 bp, Felis catus
  source 1..20: mol_type = unassigned DNA
caccttctcacctttgggtg

SEQ ID NO: 449 - DNA, 20 bp, Felis catus
  source 1..20: mol_type = unassigned DNA
cagggaatgaagacaaatga

SEQ ID NO: 450 - DNA, 20 bp, Felis catus
  source 1..20: mol_type = unassigned DNA
ccagactgcttctgtggcct

SEQ ID NO: 451 - DNA, 20 bp, Felis catus
  source 1..20: mol_type = unassigned DNA
cctacacttgctgtggacca

SEQ ID NO: 452 - DNA, 20 bp, Felis catus
  source 1..20: mol_type = unassigned DNA
cctcccagattcccagggaa

SEQ ID NO: 453 - DNA, 20 bp, Felis catus
  source 1..20: mol_type = unassigned DNA
cgaatttaggtcagaccacg

SEQ ID NO: 454 - DNA, 20 bp, Felis catus
  source 1..20: mol_type = unassigned DNA
cgagtctagcagcagttggg

SEQ ID NO: 455 - DNA, 20 bp, Felis catus
  source 1..20: mol_type = unassigned DNA
ctcatcaccttctcaccttt

SEQ ID NO: 456 - DNA, 20 bp, Felis catus
  source 1..20: mol_type = unassigned DNA
ctgcaacagtagggcagggt

SEQ ID NO: 457 - DNA, 20 bp, Felis catus
  source 1..20: mol_type = unassigned DNA
ctgctgtggctgcaacagta

SEQ ID NO: 458 - DNA, 20 bp, Felis catus
  source 1..20: mol_type = unassigned DNA
ctgcttctcagaactgcctg

SEQ ID NO: 459 - DNA, 20 bp, Felis catus
  source 1..20: mol_type = unassigned DNA
ctgtttggaaggcagccaga

SEQ ID NO: 460 - DNA, 20 bp, Felis catus
  source 1..20: mol_type = unassigned DNA
cttgctcaacatatttgtca

SEQ ID NO: 461 - DNA, 20 bp, Felis catus
  source 1..20: mol_type = unassigned DNA
cttttcagtatgtatggtgg

SEQ ID NO: 462 - DNA, 20 bp, Felis catus
  source 1..20: mol_type = unassigned DNA
gaaattttctaggttgactg

SEQ ID NO: 463 - DNA, 20 bp, Felis catus
  source 1..20: mol_type = unassigned DNA
gaatggccctctgggaccca

SEQ ID NO: 464 - DNA, 20 bp, Felis catus
  source 1..20: mol_type = unassigned DNA
gacagagcatgagcagggga

SEQ ID NO: 465 - DNA, 20 bp, Felis catus
  source 1..20: mol_type = unassigned DNA
gaccacggggaagtggggcg

SEQ ID NO: 466 - DNA, 20 bp, Felis catus
  source 1..20: mol_type = unassigned DNA
gactccccttgctaccatgg

SEQ ID NO: 467 - DNA, 20 bp, Felis catus
  source 1..20: mol_type = unassigned DNA
gagagacagagcatgagcag

SEQ ID NO: 468 - DNA, 20 bp, Felis catus
  source 1..20: mol_type = unassigned DNA
gagagagagagatcccctct

SEQ ID NO: 469 - DNA, 20 bp, Felis catus
  source 1..20: mol_type = unassigned DNA
gaggcacagaatggccctct

SEQ ID NO: 470 - DNA, 20 bp, Felis catus
  source 1..20: mol_type = unassigned DNA
gagggaggagatgtatgtgt

SEQ ID NO: 471 - DNA, 20 bp, Felis catus
  source 1..20: mol_type = unassigned DNA
gagggtttttttttgggggg

SEQ ID NO: 472 - DNA, 20 bp, Felis catus
  source 1..20: mol_type = unassigned DNA
gcacagaatggcagggcagg

SEQ ID NO: 473 - DNA, 20 bp, Felis catus
  source 1..20: mol_type = unassigned DNA
gccatgctcagaagtgccct

SEQ ID NO: 474 - DNA, 20 bp, Felis catus
  source 1..20: mol_type = unassigned DNA
gccattctctcctccctcac

SEQ ID NO: 475 - DNA, 20 bp, Felis catus
  source 1..20: mol_type = unassigned DNA
gcgaatttaggtcagaccac

SEQ ID NO: 476 - DNA, 20 bp, Felis catus
  source 1..20: mol_type = unassigned DNA
gcgagtctagcagcagttgg

SEQ ID NO: 477 - DNA, 20 bp, Felis catus
  source 1..20: mol_type = unassigned DNA
gctccccttccccgtcttga

SEQ ID NO: 478 - DNA, 20 bp, Felis catus
  source 1..20: mol_type = unassigned DNA
gctgcttctcagaactgcct

SEQ ID NO: 479 - DNA, 20 bp, Felis catus
  source 1..20: mol_type = unassigned DNA
ggactccccttgctaccatg

SEQ ID NO: 480 - DNA, 20 bp, Felis catus
  source 1..20: mol_type = unassigned DNA
ggcacagaatggcagggcag

SEQ ID NO: 481 - DNA, 20 bp, Felis catus
  source 1..20: mol_type = unassigned DNA
ggccagccccaaagcttgag

SEQ ID NO: 482 - DNA, 20 bp, Felis catus
  source 1..20: mol_type = unassigned DNA
gggccagccccaaagcttga

SEQ ID NO: 483 - DNA, 20 bp, Felis catus
  source 1..20: mol_type = unassigned DNA
gggggagtgctcaggtggtg

SEQ ID NO: 484 - DNA, 20 bp, Felis catus
  source 1..20: mol_type = unassigned DNA
ggtcagaccacggggaagtg

SEQ ID NO: 485 - DNA, 20 bp, Felis catus
  source 1..20: mol_type = unassigned DNA
gtagcctccggccagaccct

SEQ ID NO: 486 - DNA, 20 bp, Felis catus
  source 1..20: mol_type = unassigned DNA
gtcaggaaggccagagctga

SEQ ID NO: 487 - DNA, 20 bp, Felis catus
  source 1..20: mol_type = unassigned DNA
gtgatgccagggacacagga

SEQ ID NO: 488 - DNA, 20 bp, Felis catus
  source 1..20: mol_type = unassigned DNA
gtgcgagtctagcagcagtt

SEQ ID NO: 489 - DNA, 20 bp, Felis catus
  source 1..20: mol_type = unassigned DNA
gtggctgcaacagtagggca

SEQ ID NO: 490 - DNA, 20 bp, Felis catus
  source 1..20: mol_type = unassigned DNA
gttcagcagactcttttctg

SEQ ID NO: 491 - DNA, 20 bp, Felis catus
  source 1..20: mol_type = unassigned DNA
tagcctccggccagaccctg

SEQ ID NO: 492 - DNA, 20 bp, Felis catus
  source 1..20: mol_type = unassigned DNA
tcacagagatacccctcctg

SEQ ID NO: 493 - DNA, 20 bp, Felis catus
  source 1..20: mol_type = unassigned DNA
tcaccttctcacctttgggt

SEQ ID NO: 494 - DNA, 20 bp, Felis catus
  source 1..20: mol_type = unassigned DNA
tcagcccagagcctgacgcg

SEQ ID NO: 495 - DNA, 20 bp, Felis catus
  source 1..20: mol_type = unassigned DNA
tctaggttgactggggaaag

SEQ ID NO: 496 - DNA, 20 bp, Felis catus
  source 1..20: mol_type = unassigned DNA
tctgcttcttgaccacgcca

SEQ ID NO: 497 - DNA, 20 bp, Felis catus
  source 1..20: mol_type = unassigned DNA
tgaaattttctaggttgact

SEQ ID NO: 498 - DNA, 20 bp, Felis catus
  source 1..20: mol_type = unassigned DNA
tgagggtttttttttggggg

SEQ ID NO: 499 - DNA, 20 bp, Felis catus
  source 1..20: mol_type = unassigned DNA
tgcgagtctagcagcagttg

SEQ ID NO: 500 - DNA, 20 bp, Felis catus
  source 1..20: mol_type = unassigned DNA
tgcttctcagaactgcctgg

SEQ ID NO: 501 - DNA, 20 bp, Felis catus
  source 1..20: mol_type = unassigned DNA
tggaaggcagccagagggga

SEQ ID NO: 502 - DNA, 20 bp, Felis catus
  source 1..20: mol_type = unassigned DNA
tggactccccttgctaccat

SEQ ID NO: 503 - DNA, 20 bp, Felis catus
  source 1..20: mol_type = unassigned DNA
tgggggagtgctcaggtggt

SEQ ID NO: 504 - DNA, 20 bp, Felis catus
  source 1..20: mol_type = unassigned DNA
tgtttggaaggcagccagag

SEQ ID NO: 505 - DNA, 20 bp, Felis catus
  source 1..20: mol_type = unassigned DNA
ttcaatgtttatttattttt

SEQ ID NO: 506 - DNA, 20 bp, Felis catus
  source 1..20: mol_type = unassigned DNA
ttcagcagactcttttctgg

SEQ ID NO: 507 - DNA, 20 bp, Felis catus
  source 1..20: mol_type = unassigned DNA
ttctaggttgactggggaaa

SEQ ID NO: 508 - DNA, 20 bp, Felis catus
  source 1..20: mol_type = unassigned DNA
ttgctcaacatatttgtcag

SEQ ID NO: 509 - DNA, 20 bp, Felis catus
  source 1..20: mol_type = unassigned DNA
tttctcctcccagattccca

SEQ ID NO: 510 - DNA, 20 bp, Felis catus
  source 1..20: mol_type = unassigned DNA
aaaaggaggccggtctctgg

SEQ ID NO: 511 - DNA, 20 bp, Felis catus
  source 1..20: mol_type = unassigned DNA
aaatatcatttccccccaac

SEQ ID NO: 512 - DNA, 20 bp, Felis catus
  source 1..20: mol_type = unassigned DNA
aacgcagttcttcaggtttc

SEQ ID NO: 513 - DNA, 20 bp, Felis catus
  source 1..20: mol_type = unassigned DNA
aagtcaggcctcccgaatga

SEQ ID NO: 514 - DNA, 20 bp, Felis catus
  source 1..20: mol_type = unassigned DNA
aagttcagcagactcttttc

SEQ ID NO: 515 - DNA, 20 bp, Felis catus
  source 1..20: mol_type = unassigned DNA
accaaaaggaggccggtctc

SEQ ID NO: 516 - DNA, 20 bp, Felis catus
  source 1..20: mol_type = unassigned DNA
agagaaaaggaactgacgtt

SEQ ID NO: 517 - DNA, 20 bp, Felis catus
  source 1..20: mol_type = unassigned DNA
agagagagagagatcccctc

SEQ ID NO: 518 - DNA, 20 bp, Felis catus
  source 1..20: mol_type = unassigned DNA
agattcccagggaagggcca

SEQ ID NO: 519 - DNA, 20 bp, Felis catus
  source 1..20: mol_type = unassigned DNA
aggtctcactctgggcaagg

SEQ ID NO: 520 - DNA, 20 bp, Felis catus
  source 1..20: mol_type = unassigned DNA
agtagcctccggccagaccc

SEQ ID NO: 521 - DNA, 20 bp, Felis catus
  source 1..20: mol_type = unassigned DNA
atcaccttctcacctttggg

SEQ ID NO: 522 - DNA, 20 bp, Felis catus
  source 1..20: mol_type = unassigned DNA
atctatgacattggaagacc

SEQ ID NO: 523 - DNA, 20 bp, Felis catus
  source 1..20: mol_type = unassigned DNA
atgtgaccttgaagatggtc

SEQ ID NO: 524 - DNA, 20 bp, Felis catus
  source 1..20: mol_type = unassigned DNA
attacatgtgaccttgaaga

SEQ ID NO: 525 - DNA, 20 bp, Felis catus
  source 1..20: mol_type = unassigned DNA
caagaacttttcagtatgta

SEQ ID NO: 526 - DNA, 20 bp, Felis catus
  source 1..20: mol_type = unassigned DNA
cacaacctgcttatgacctc

SEQ ID NO: 527 - DNA, 20 bp, Felis catus
  source 1..20: mol_type = unassigned DNA
cagacagccatctggctgtt

SEQ ID NO: 528 - DNA, 20 bp, Felis catus
  source 1..20: mol_type = unassigned DNA
cagggcagggggagggcttt

SEQ ID NO: 529 - DNA, 20 bp, Felis catus
  source 1..20: mol_type = unassigned DNA
caggtgctccctccccagcc

SEQ ID NO: 530 - DNA, 20 bp, Felis catus
  source 1..20: mol_type = unassigned DNA
cagtatgtatggtgggggag

SEQ ID NO: 531 - DNA, 20 bp, Felis catus
  source 1..20: mol_type = unassigned DNA
cagtctcctgaatctgattc

SEQ ID NO: 532 - DNA, 20 bp, Felis catus
  source 1..20: mol_type = unassigned DNA
ccaagagccaggtctcactc

SEQ ID NO: 533 - DNA, 20 bp, Felis catus
  source 1..20: mol_type = unassigned DNA
ccaagcagcgttgagcagcc

SEQ ID NO: 534 - DNA, 20 bp, Felis catus
  source 1..20: mol_type = unassigned DNA
ccacccaggcgcccctcacc

SEQ ID NO: 535 - DNA, 20 bp, Felis catus
  source 1..20: mol_type = unassigned DNA
ccagaccctgggggtcagag

SEQ ID NO: 536 - DNA, 20 bp, Felis catus
  source 1..20: mol_type = unassigned DNA
cccctctacttccccagcca

SEQ ID NO: 537 - DNA, 20 bp, Felis catus
  source 1..20: mol_type = unassigned DNA
cctaacaagcatatgattca

SEQ ID NO: 538 - DNA, 20 bp, Felis catus
  source 1..20: mol_type = unassigned DNA
cctgcagacccccaagccgg

SEQ ID NO: 539 - DNA, 20 bp, Felis catus
  source 1..20: mol_type = unassigned DNA
cctgcagacccccaagctgg

SEQ ID NO: 540 - DNA, 20 bp, Felis catus
  source 1..20: mol_type = unassigned DNA
ccttccatcatcctctctct

SEQ ID NO: 541 - DNA, 20 bp, Felis catus
  source 1..20: mol_type = unassigned DNA
cgccatgctcagaagtgccc

SEQ ID NO: 542 - DNA, 20 bp, Felis catus
  source 1..20: mol_type = unassigned DNA
cggaccgcgagatcgtgacc

SEQ ID NO: 543 - DNA, 20 bp, Felis catus
  source 1..20: mol_type = unassigned DNA
ctcactccctacacttgctg

SEQ ID NO: 544 - DNA, 20 bp, Felis catus
  source 1..20: mol_type = unassigned DNA
ctgaaattttctaggttgac

SEQ ID NO: 545 - DNA, 20 bp, Felis catus
  source 1..20: mol_type = unassigned DNA
ctgaaccctcccctacatgc

SEQ ID NO: 546 - DNA, 20 bp, Felis catus
  source 1..20: mol_type = unassigned DNA
ctgagccctcccctacatgc

SEQ ID NO: 547 - DNA, 20 bp, Felis catus
  source 1..20: mol_type = unassigned DNA
ctggactccccttgctacca

SEQ ID NO: 548 - DNA, 20 bp, Felis catus
  source 1..20: mol_type = unassigned DNA
ctgggggagtgctcaggtgg

SEQ ID NO: 549 - DNA, 20 bp, Felis catus
  source 1..20: mol_type = unassigned DNA
cttgaccgagtcctgtcacc

SEQ ID NO: 550 - DNA, 20 bp, Felis catus
  source 1..20: mol_type = unassigned DNA
ctttcaagctatctgaggtt

SEQ ID NO: 551 - DNA, 20 bp, Felis catus
  source 1..20: mol_type = unassigned DNA
gaaaagccagactgcttctg

SEQ ID NO: 552 - DNA, 20 bp, Felis catus
  source 1..20: mol_type = unassigned DNA
gaaacccagtgcttagctag

SEQ ID NO: 553 - DNA, 20 bp, Felis catus
  source 1..20: mol_type = unassigned DNA
gaacccttttatacctgctg

SEQ ID NO: 554 - DNA, 20 bp, Felis catus
  source 1..20: mol_type = unassigned DNA
gaacttttcagtatgtatgg

SEQ ID NO: 555 - DNA, 20 bp, Felis catus
  source 1..20: mol_type = unassigned DNA
gaagacctggcccactcatc

SEQ ID NO: 556 - DNA, 20 bp, Felis catus
  source 1..20: mol_type = unassigned DNA
gaagatccagtctcacgtgc

SEQ ID NO: 557 - DNA, 20 bp, Felis catus
  source 1..20: mol_type = unassigned DNA
gaatatcatttccccccaac

SEQ ID NO: 558 - DNA, 20 bp, Felis catus
  source 1..20: mol_type = unassigned DNA
gacaaatgagggtttttttt

SEQ ID NO: 559 - DNA, 20 bp, Felis catus
  source 1..20: mol_type = unassigned DNA
gaccctgggggtcagagtgg

SEQ ID NO: 560 - DNA, 20 bp, Felis catus
  source 1..20: mol_type = unassigned DNA
gagcccccttcatgatgcag

SEQ ID NO: 561 - DNA, 20 bp, Felis catus
  source 1..20: mol_type = unassigned DNA
gaggcaccgccaggcctctc

SEQ ID NO: 562 - DNA, 20 bp, Felis catus
  source 1..20: mol_type = unassigned DNA
gagtgctcaggtggtgggga

SEQ ID NO: 563 - DNA, 20 bp, Felis catus
  source 1..20: mol_type = unassigned DNA
gagtggtggaatatacaccc

SEQ ID NO: 564 - DNA, 20 bp, Felis catus
  source 1..20: mol_type = unassigned DNA
gatcacagagatacccctcc

SEQ ID NO: 565 - DNA, 20 bp, Felis catus
  source 1..20: mol_type = unassigned DNA
gccagactgcttctgtggcc

SEQ ID NO: 566 - DNA, 20 bp, Felis catus
  source 1..20: mol_type = unassigned DNA
gctcatcaccttctcacctt

SEQ ID NO: 567 - DNA, 20 bp, Felis catus
  source 1..20: mol_type = unassigned DNA
gctgcaacagtagggcaggg

SEQ ID NO: 568 - DNA, 20 bp, Felis catus
  source 1..20: mol_type = unassigned DNA
gctgggcaaatttcacaatc

SEQ ID NO: 569 - DNA, 20 bp, Felis catus
  source 1..20: mol_type = unassigned DNA
ggagggaggagatgtatgtg

SEQ ID NO: 570 - DNA, 20 bp, Felis catus
  source 1..20: mol_type = unassigned DNA
ggctgcttctcagaactgcc

SEQ ID NO: 571 - DNA, 20 bp, Felis catus
  source 1..20: mol_type = unassigned DNA
gtcaacagatgacgctacct

SEQ ID NO: 572 - DNA, 20 bp, Felis catus
  source 1..20: mol_type = unassigned DNA
gtctcacgtgctggagaggc

SEQ ID NO: 573 - DNA, 20 bp, Felis catus
  source 1..20: mol_type = unassigned DNA
gtttttttttgggggggggg

SEQ ID NO: 574 - DNA, 20 bp, Felis catus
  source 1..20: mol_type = unassigned DNA
taggtcagaccacggggaag

SEQ ID NO: 575 - DNA, 20 bp, Felis catus
  source 1..20: mol_type = unassigned DNA
tatacaccctgggtcacata

SEQ ID NO: 576 - DNA, 20 bp, Felis catus
  source 1..20: mol_type = unassigned DNA
tatgtatggtgggggagtgg

SEQ ID NO: 577 - DNA, 20 bp, Felis catus
  source 1..20: mol_type = unassigned DNA
tattcacaccattatctctc

SEQ ID NO: 578 - DNA, 20 bp, Felis catus
  source 1..20: mol_type = unassigned DNA
tcaacatccctcttcacggc

SEQ ID NO: 579 - DNA, 20 bp, Felis catus
  source 1..20: mol_type = unassigned DNA
tcagaactgcctgggggctg

SEQ ID NO: 580 - DNA, 20 bp, Felis catus
  source 1..20: mol_type = unassigned DNA
tcagtatttgaggcacagaa

SEQ ID NO: 581 - DNA, 20 bp, Felis catus
  source 1..20: mol_type = unassigned DNA
tctagcagcagttggggggc

SEQ ID NO: 582 - DNA, 20 bp, Felis catus
  source 1..20: mol_type = unassigned DNA
tgaggcacagaatggccctc

SEQ ID NO: 583 - DNA, 20 bp, Felis catus
  source 1..20: mol_type = unassigned DNA
tgagtcttcatctatgacat

SEQ ID NO: 584 - DNA, 20 bp, Felis catus
  source 1..20: mol_type = unassigned DNA
tgggaaggtgttagaacccc

SEQ ID NO: 585 - DNA, 20 bp, Felis catus
  source 1..20: mol_type = unassigned DNA
tgtgcgagtctagcagcagt

SEQ ID NO: 586 - DNA, 20 bp, Felis catus
  source 1..20: mol_type = unassigned DNA
tgtgtccttgacctgctcag

SEQ ID NO: 587 - DNA, 20 bp, Felis catus
  source 1..20: mol_type = unassigned DNA
ttcccagggaagggccatgg

SEQ ID NO: 588 - DNA, 20 bp, Felis catus
  source 1..20: mol_type = unassigned DNA
ttggatgtcagacagccatc

SEQ ID NO: 589 - DNA, 20 bp, Felis catus
  source 1..20: mol_type = unassigned DNA
ttggggggctggttgtgtct

SEQ ID NO: 590 - DNA, 20 bp, Felis catus
  source 1..20: mol_type = unassigned DNA
ttggtatgtgaggcacagaa

SEQ ID NO: 591 - DNA, 20 bp, Felis catus
  source 1..20: mol_type = unassigned DNA
tttcaatgtttatttatttt

SEQ ID NO: 592 - DNA, 20 bp, Felis catus
  source 1..20: mol_type = unassigned DNA
tttctgggggagtgctcagg

SEQ ID NO: 593 - DNA, 20 bp, Felis catus
  source 1..20: mol_type = unassigned DNA
tttggggggggggtggaata

SEQ ID NO: 594 - DNA, 20 bp, Felis catus
  source 1..20: mol_type = unassigned DNA
aaaaatcacaggaggggtca

SEQ ID NO: 595 - DNA, 20 bp, Felis catus
  source 1..20: mol_type = unassigned DNA
aaaacgtaaagacagaaaat

SEQ ID NO: 596 - DNA, 20 bp, Felis catus
  source 1..20: mol_type = unassigned DNA
aaaagaatcagcagagcagg

SEQ ID NO: 597 - DNA, 20 bp, Felis catus
  source 1..20: mol_type = unassigned DNA
aaacatcaggggggttctgc

SEQ ID NO: 598 - DNA, 20 bp, Felis catus
  source 1..20: mol_type = unassigned DNA
aaagagataaaaatcacagg

SEQ ID NO: 599 - DNA, 20 bp, Felis catus
  source 1..20: mol_type = unassigned DNA
aaagtgtccaacttcggctc

SEQ ID NO: 600 - DNA, 20 bp, Felis catus
  source 1..20: mol_type = unassigned DNA
aacgtttatttttaagagag

SEQ ID NO: 601 - DNA, 20 bp, Felis catus
  source 1..20: mol_type = unassigned DNA
aactgagagttcctgcagaa

SEQ ID NO: 602 - DNA, 20 bp, Felis catus
  source 1..20: mol_type = unassigned DNA
aactttctctttcctgtgga

SEQ ID NO: 603 - DNA, 20 bp, Felis catus
  source 1..20: mol_type = unassigned DNA
aataccactgagacacggag

SEQ ID NO: 604 - DNA, 20 bp, Felis catus
  source 1..20: mol_type = unassigned DNA
aatgtttaaataaataaata

SEQ ID NO: 605 - DNA, 20 bp, Felis catus
  source 1..20: mol_type = unassigned DNA
acagaccgatttctggagag

SEQ ID NO: 606 - DNA, 20 bp, Felis catus
  source 1..20: mol_type = unassigned DNA
acaggaggatggggctcaga

SEQ ID NO: 607 - DNA, 20 bp, Felis catus
  source 1..20: mol_type = unassigned DNA
accagaagcttcccaaagcc

SEQ ID NO: 608 - DNA, 20 bp, Felis catus
  source 1..20: mol_type = unassigned DNA
acccacgcacctgtgccagg

SEQ ID NO: 609 - DNA, 20 bp, Felis catus
  source 1..20: mol_type = unassigned DNA
acctccctttgccatgtccc

SEQ ID NO: 610 - DNA, 20 bp, Felis catus
  source 1..20: mol_type = unassigned DNA
agaagaggagaagattctgg

SEQ ID NO: 611 - DNA, 20 bp, Felis catus
  source 1..20: mol_type = unassigned DNA
agaccctgaattgatacaga

SEQ ID NO: 612 - DNA, 20 bp, Felis catus
  source 1..20: mol_type = unassigned DNA
agagcaactcacatatatcc

SEQ ID NO: 613 - DNA, 20 bp, Felis catus
  source 1..20: mol_type = unassigned DNA
agagtgaattaggtgaggac

SEQ ID NO: 614 - DNA, 20 bp, Felis catus
  source 1..20: mol_type = unassigned DNA
agcctgattgagagtgaatt

SEQ ID NO: 615 - DNA, 20 bp, Felis catus
  source 1..20: mol_type = unassigned DNA
agctccaaaggcctgtgggc

SEQ ID NO: 616 - DNA, 20 bp, Felis catus
  source 1..20: mol_type = unassigned DNA
agtgggggaggggcagagag

SEQ ID NO: 617 - DNA, 20 bp, Felis catus
  source 1..20: mol_type = unassigned DNA
agttggagctccacatacca

SEQ ID NO: 618 - DNA, 20 bp, Felis catus
  source 1..20: mol_type = unassigned DNA
ataggtactctcccttaagg

SEQ ID NO: 619 - DNA, 20 bp, Felis catus
  source 1..20: mol_type = unassigned DNA
atctgggagagagtaagacg

SEQ ID NO: 620 - DNA, 20 bp, Felis catus
  source 1..20: mol_type = unassigned DNA
atgggggctgggcctgggtg

SEQ ID NO: 621 - DNA, 20 bp, Felis catus
  source 1..20: mol_type = unassigned DNA
atgtcccaggatctcctgcc

SEQ ID NO: 622 - DNA, 20 bp, Felis catus
  source 1..20: mol_type = unassigned DNA
attctacgactaaaaacatc

SEQ ID NO: 623 - DNA, 20 bp, Felis catus
  source 1..20: mol_type = unassigned DNA
caaaggaatagcagccatca

SEQ ID NO: 624 - DNA, 20 bp, Felis catus
  source 1..20: mol_type = unassigned DNA
caaggtgccaggtcaaccaa

SEQ ID NO: 625 - DNA, 20 bp, Felis catus
  source 1..20: mol_type = unassigned DNA
cacaaaagaatcagcagagc

SEQ ID NO: 626 - DNA, 20 bp, Felis catus
  source 1..20: mol_type = unassigned DNA
cacataggtactctccctta

SEQ ID NO: 627 - DNA, 20 bp, Felis catus
  source 1..20: mol_type = unassigned DNA
cagacggaacattttctatg

SEQ ID NO: 628 - DNA, 20 bp, Felis catus
  source 1..20: mol_type = unassigned DNA
cagactccaaagcaggattc

SEQ ID NO: 629 - DNA, 20 bp, Felis catus
  source 1..20: mol_type = unassigned DNA
cagcacttaacggcaagtag

SEQ ID NO: 630 - DNA, 20 bp, Felis catus
  source 1..20: mol_type = unassigned DNA
cagccatcaaggtgggcaca

SEQ ID NO: 631 - DNA, 20 bp, Felis catus
  source 1..20: mol_type = unassigned DNA
cagctttaggtgtaaagaac

SEQ ID NO: 632 - DNA, 20 bp, Felis catus
  source 1..20: mol_type = unassigned DNA
caggcatgagctgtcagcac

SEQ ID NO: 633 - DNA, 20 bp, Felis catus
  source 1..20: mol_type = unassigned DNA
cagtagcattgacttttgtg

SEQ ID NO: 634 - DNA, 20 bp, Felis catus
  source 1..20: mol_type = unassigned DNA
ccagtgagggaggcaagaag

SEQ ID NO: 635 - DNA, 20 bp, Felis catus
  source 1..20: mol_type = unassigned DNA
cccccccccagaagctccaa

SEQ ID NO: 636 - DNA, 20 bp, Felis catus
  source 1..20: mol_type = unassigned DNA
ccctgccaggatgacattta

SEQ ID NO: 637 - DNA, 20 bp, Felis catus
  source 1..20: mol_type = unassigned DNA
cctaaccgactgagccaccc

SEQ ID NO: 638 - DNA, 20 bp, Felis catus
  source 1..20: mol_type = unassigned DNA
cgtaaggtaattcgcacaca

SEQ ID NO: 639 - DNA, 20 bp, Felis catus
  source 1..20: mol_type = unassigned DNA
cgtagctaggagctgcctcg

SEQ ID NO: 640 - DNA, 20 bp, Felis catus
  source 1..20: mol_type = unassigned DNA
ctattttccaactgtgcgta

SEQ ID NO: 641 - DNA, 20 bp, Felis catus
  source 1..20: mol_type = unassigned DNA
ctcaggacgcttgggcatgt

SEQ ID NO: 642 - DNA, 20 bp, Felis catus
  source 1..20: mol_type = unassigned DNA
ctccctactaggggagtctc

SEQ ID NO: 643 - DNA, 20 bp, Felis catus
  source 1..20: mol_type = unassigned DNA
ctgctgcacgcgcaacgtga

SEQ ID NO: 644 - DNA, 20 bp, Felis catus
  source 1..20: mol_type = unassigned DNA
ctgcttccctctcaccctta

SEQ ID NO: 645 - DNA, 20 bp, Felis catus
  source 1..20: mol_type = unassigned DNA
ctgggcctgggtgaggggca

SEQ ID NO: 646 - DNA, 20 bp, Felis catus
  source 1..20: mol_type = unassigned DNA
ctgggtgtgcacatggcgtg

SEQ ID NO: 647 - DNA, 20 bp, Felis catus
  source 1..20: mol_type = unassigned DNA
cttcctgggaagagagtctg

SEQ ID NO: 648 - DNA, 20 bp, Felis catus
  source 1..20: mol_type = unassigned DNA
ctttgccaaagaccaactgg

SEQ ID NO: 649 - DNA, 20 bp, Felis catus
  source 1..20: mol_type = unassigned DNA
gaaggttggggaggcgggga

SEQ ID NO: 650 - DNA, 20 bp, Felis catus
  source 1..20: mol_type = unassigned DNA
gaagtgagactctgaaccaa

SEQ ID NO: 651 - DNA, 20 bp, Felis catus
  source 1..20: mol_type = unassigned DNA
gacaaagagataaaaatcac

SEQ ID NO: 652 - DNA, 20 bp, Felis catus
  source 1..20: mol_type = unassigned DNA
gacaaggctcctacatgtgc

SEQ ID NO: 653 - DNA, 20 bp, Felis catus
  source 1..20: mol_type = unassigned DNA
gacacgtgtggtagaagaac

SEQ ID NO: 654 - DNA, 20 bp, Felis catus
  source 1..20: mol_type = unassigned DNA
gagagaatagcccaaggaag

SEQ ID NO: 655 - DNA, 20 bp, Felis catus
  source 1..20: mol_type = unassigned DNA
gagatcaccatgggaggtaa

SEQ ID NO: 656 - DNA, 20 bp, Felis catus
  source 1..20: mol_type = unassigned DNA
gagcagggcaaggatcagga

SEQ ID NO: 657 - DNA, 20 bp, Felis catus
  source 1..20: mol_type = unassigned DNA
gagtgagatagagcagggca

SEQ ID NO: 658 - DNA, 20 bp, Felis catus
  source 1..20: mol_type = unassigned DNA
gatagagcagggcaaggatc

SEQ ID NO: 659 - DNA, 20 bp, Felis catus
  source 1..20: mol_type = unassigned DNA
gatgacatttaagggactag

SEQ ID NO: 660 - DNA, 20 bp, Felis catus
  source 1..20: mol_type = unassigned DNA
gattgagagtgaattaggtg

SEQ ID NO: 661 - DNA, 20 bp, Felis catus
  source 1..20: mol_type = unassigned DNA
gatttgtgataaacccactc

SEQ ID NO: 662 - DNA, 20 bp, Felis catus
  source 1..20: mol_type = unassigned DNA
gcagagacctgcccactccc

SEQ ID NO: 663 - DNA, 20 bp, Felis catus
  source 1..20: mol_type = unassigned DNA
gcagatgagagaatagccca

SEQ ID NO: 664 - DNA, 20 bp, Felis catus
  source 1..20: mol_type = unassigned DNA
gcagcgctatccattccccc

SEQ ID NO: 665 - DNA, 20 bp, Felis catus
  source 1..20: mol_type = unassigned DNA
gcattctagataatacacat

SEQ ID NO: 666 - DNA, 20 bp, Felis catus
  source 1..20: mol_type = unassigned DNA
gccacccaggcgcccctgcc

SEQ ID NO: 667 - DNA, 20 bp, Felis catus
  source 1..20: mol_type = unassigned DNA
gcgcaacgtgaaggttgggg

SEQ ID NO: 668 - DNA, 20 bp, Felis catus
  source 1..20: mol_type = unassigned DNA
gctacaaatcactccctact

SEQ ID NO: 669 - DNA, 20 bp, Felis catus
  source 1..20: mol_type = unassigned DNA
gctccacataccaaggtgcc

SEQ ID NO: 670 - DNA, 20 bp, Felis catus
  source 1..20: mol_type = unassigned DNA
gctgctagaatgctctgctc

SEQ ID NO: 671 - DNA, 20 bp, Felis catus
  source 1..20: mol_type = unassigned DNA
ggaagcccttcctactcttg

SEQ ID NO: 672 - DNA, 20 bp, Felis catus
  source 1..20: mol_type = unassigned DNA
ggacagatctacaccactac

SEQ ID NO: 673 - DNA, 20 bp, Felis catus
  source 1..20: mol_type = unassigned DNA
ggagacacagactccaaagc

SEQ ID NO: 674 - DNA, 20 bp, Felis catus
  source 1..20: mol_type = unassigned DNA
ggagctgcctcgagggcctc

SEQ ID NO: 675 - DNA, 20 bp, Felis catus
  source 1..20: mol_type = unassigned DNA
ggctggtaacgctctaaatt

SEQ ID NO: 676 - DNA, 20 bp, Felis catus
  source 1..20: mol_type = unassigned DNA
gggagtctgaacaaccagtg

SEQ ID NO: 677 - DNA, 20 bp, Felis catus
  source 1..20: mol_type = unassigned DNA
gggccgcgatcagtcagacc

SEQ ID NO: 678 - DNA, 20 bp, Felis catus
  source 1..20: mol_type = unassigned DNA
gggtgcagctgcacgtagct

SEQ ID NO: 679 - DNA, 20 bp, Felis catus
  source 1..20: mol_type = unassigned DNA
ggtgtaaagaacaggacagg

SEQ ID NO: 680 - DNA, 20 bp, Felis catus
  source 1..20: mol_type = unassigned DNA
ggtgtctggattccagcttt

SEQ ID NO: 681 - DNA, 20 bp, Felis catus
  source 1..20: mol_type = unassigned DNA
gtaaacttaatcccaagagg

SEQ ID NO: 682 - DNA, 20 bp, Felis catus
  source 1..20: mol_type = unassigned DNA
gtaaaggagtgagatagagc

SEQ ID NO: 683 - DNA, 20 bp, Felis catus
  source 1..20: mol_type = unassigned DNA
gtcacccacgcacctgtgcc

SEQ ID NO: 684 - DNA, 20 bp, Felis catus
  source 1..20: mol_type = unassigned DNA
gtctgaacaaccagtgaggg

SEQ ID NO: 685 - DNA, 20 bp, Felis catus
  source 1..20: mol_type = unassigned DNA
gtgggtctgagacccgtgtc

SEQ ID NO: 686 - DNA, 20 bp, Felis catus
  source 1..20: mol_type = unassigned DNA
taaactcaaccttctaatct

SEQ ID NO: 687 - DNA, 20 bp, Felis catus
  source 1..20: mol_type = unassigned DNA
tagaatgctctgctcaggac

SEQ ID NO: 688 - DNA, 20 bp, Felis catus
  source 1..20: mol_type = unassigned DNA
tagtccatgaaaattattga

SEQ ID NO: 689 - DNA, 20 bp, Felis catus
  source 1..20: mol_type = unassigned DNA
tcacctgagactcatctgtc

SEQ ID NO: 690 - DNA, 20 bp, Felis catus
  source 1..20: mol_type = unassigned DNA
tcagtaaacttaatcccaag

SEQ ID NO: 691 - DNA, 20 bp, Felis catus
  source 1..20: mol_type = unassigned DNA
tcttgactccaagtagctcc

SEQ ID NO: 692 - DNA, 20 bp, Felis catus
  source 1..20: mol_type = unassigned DNA
tgaggacaaagctcttggag

SEQ ID NO: 693 - DNA, 20 bp, Felis catus
  source 1..20: mol_type = unassigned DNA
tgagtcacccttaaattgcc

SEQ ID NO: 694 - DNA, 20 bp, Felis catus
  source 1..20: mol_type = unassigned DNA
tgcacacgtgcaagtggggg

SEQ ID NO: 695 - DNA, 20 bp, Felis catus
  source 1..20: mol_type = unassigned DNA
tgggaagagagtctgagggc

SEQ ID NO: 696 - DNA, 20 bp, Felis catus
  source 1..20: mol_type = unassigned DNA
tgggagagagtaagacgagg

SEQ ID NO: 697 - DNA, 20 bp, Felis catus
  source 1..20: mol_type = unassigned DNA
tgggcatgtaggcctcctca

SEQ ID NO: 698 - DNA, 20 bp, Felis catus
  source 1..20: mol_type = unassigned DNA
tgtgctgtagagcggagcaa

SEQ ID NO: 699 - DNA, 20 bp, Felis catus
  source 1..20: mol_type = unassigned DNA
tgtttggagatcaccatggg

SEQ ID NO: 700 - DNA, 20 bp, Felis catus
  source 1..20: mol_type = unassigned DNA
ttaggtgtaaagaacaggac

SEQ ID NO: 701 - DNA, 20 bp, Felis catus
  source 1..20: mol_type = unassigned DNA
ttcctccaccagaactgaca

SEQ ID NO: 702 - DNA, 20 bp, Felis catus
  source 1..20: mol_type = unassigned DNA
ttggggaggcggggaaggaa

SEQ ID NO: 703 - DNA, 20 bp, Felis catus
  source 1..20: mol_type = unassigned DNA
agacccctgaccggtgcctc

SEQ ID NO: 704 - DNA, 20 bp, Felis catus
  source 1..20: mol_type = unassigned DNA
aggcaaataccactgagaca

SEQ ID NO: 705 - DNA, 20 bp, Felis catus
  source 1..20: mol_type = unassigned DNA
caacgtgaaggttggggagg

SEQ ID NO: 706 - DNA, 20 bp, Felis catus
  source 1..20: mol_type = unassigned DNA
cagccggagagacccctgac

SEQ ID NO: 707 - DNA, 20 bp, Felis catus
  source 1..20: mol_type = unassigned DNA
cagtcagaccaggatggaga

SEQ ID NO: 708 - DNA, 20 bp, Felis catus
  source 1..20: mol_type = unassigned DNA
ctgcttacatcccagacaga

SEQ ID NO: 709 - DNA, 20 bp, Felis catus
  source 1..20: mol_type = unassigned DNA
gaacacagacacggggcacc

SEQ ID NO: 710 - DNA, 20 bp, Felis catus
  source 1..20: mol_type = unassigned DNA
gcaccccagcctgcctgttt

SEQ ID NO: 711 - DNA, 20 bp, Felis catus
  source 1..20: mol_type = unassigned DNA
gggcgcctgggtggctcagt

SEQ ID NO: 712 - DNA, 20 bp, Felis catus
  source 1..20: mol_type = unassigned DNA
gggctcagaaggggcatcag

SEQ ID NO: 713 - DNA, 20 bp, Felis catus
  source 1..20: mol_type = unassigned DNA
gtattctatgtgctgtagag

SEQ ID NO: 714 - DNA, 20 bp, Felis catus
  source 1..20: mol_type = unassigned DNA
gttcagcttgagatcttcta

SEQ ID NO: 715 - DNA, 20 bp, Felis catus
  source 1..20: mol_type = unassigned DNA
tcccgcacagaacacagaca

SEQ ID NO: 716 - DNA, 20 bp, Felis catus
  source 1..20: mol_type = unassigned DNA
tcggttaaagtgtccaactt

SEQ ID NO: 717 - DNA, 20 bp, Felis catus
  source 1..20: mol_type = unassigned DNA
tctcagcagaagagagcagc

SEQ ID NO: 718 - DNA, 20 bp, Felis catus
  source 1..20: mol_type = unassigned DNA
tttacagaatcagcacttaa

SEQ ID NO: 719 - DNA, 20 bp, Felis catus
  source 1..20: mol_type = unassigned DNA
aaaaagacgtcataaaaaat

SEQ ID NO: 720 - DNA, 20 bp, Felis catus
  source 1..20: mol_type = unassigned DNA
aaaagacgtcataaaaaatg

SEQ ID NO: 721 - DNA, 20 bp, Felis catus
  source 1..20: mol_type = unassigned DNA
aaacattagtgaatagttgt

SEQ ID NO: 722 - DNA, 20 bp, Felis catus
  source 1..20: mol_type = unassigned DNA
aaagaacaggacaggaggat

SEQ ID NO: 723 - DNA, 20 bp, Felis catus
  source 1..20: mol_type = unassigned DNA
aaatacactgaccagccctg

SEQ ID NO: 724 - DNA, 20 bp, Felis catus
  source 1..20: mol_type = unassigned DNA
aacacagacacggggcaccc

SEQ ID NO: 725 - DNA, 20 bp, Felis catus
  source 1..20: mol_type = unassigned DNA
aacattagtgaatagttgtg

SEQ ID NO: 726 - DNA, 20 bp, Felis catus
  source 1..20: mol_type = unassigned DNA
aacgtgaaggttggggaggc

SEQ ID NO: 727 - DNA, 20 bp, Felis catus
  source 1..20: mol_type = unassigned DNA
aagaacaggacaggaggatg

SEQ ID NO: 728 - DNA, 20 bp, Felis catus
  source 1..20: mol_type = unassigned DNA
aagagataaaaatcacagga

SEQ ID NO: 729 - DNA, 20 bp, Felis catus
  source 1..20: mol_type = unassigned DNA
aagattctggagggcgcgat

SEQ ID NO: 730 - DNA, 20 bp, Felis catus
  source 1..20: mol_type = unassigned DNA
aagccagggagtcccttcct

SEQ ID NO: 731 - DNA, 20 bp, Felis catus
  source 1..20: mol_type = unassigned DNA
aagtcctggagataagtatg

SEQ ID NO: 732 - DNA, 20 bp, Felis catus
  source 1..20: mol_type = unassigned DNA
aatgggtggacaccatcctt

SEQ ID NO: 733 - DNA, 20 bp, Felis catus
  source 1..20: mol_type = unassigned DNA
acacagacacggggcacccg

SEQ ID NO: 734 - DNA, 20 bp, Felis catus
  source 1..20: mol_type = unassigned DNA
acccttgggctgttaagagt

SEQ ID NO: 735 - DNA, 20 bp, Felis catus
  source 1..20: mol_type = unassigned DNA
acctgtttggagatcaccat

SEQ ID NO: 736 - DNA, 20 bp, Felis catus
  source 1..20: mol_type = unassigned DNA
acgtgaaggttggggaggcg

SEQ ID NO: 737 - DNA, 20 bp, Felis catus
  source 1..20: mol_type = unassigned DNA
acgtttatttttaagagaga

SEQ ID NO: 738 - DNA, 20 bp, Felis catus
  source 1..20: mol_type = unassigned DNA
agagataaaaatcacaggag

SEQ ID NO: 739 - DNA, 20 bp, Felis catus
  source 1..20: mol_type = unassigned DNA
agattctggagggcgcgatg

SEQ ID NO: 740 - DNA, 20 bp, Felis catus
  source 1..20: mol_type = unassigned DNA
agccatcaaggtgggcacaa

SEQ ID NO: 741 - DNA, 20 bp, Felis catus
  source 1..20: mol_type = unassigned DNA
aggaggatggggctcagaag

SEQ ID NO: 742 - DNA, 20 bp, Felis catus
  source 1..20: mol_type = unassigned DNA
aggcatgagctgtcagcaca

SEQ ID NO: 743 - DNA, 20 bp, Felis catus
  source 1..20: mol_type = unassigned DNA
aggggagtctcaggacgctt

SEQ ID NO: 744 - DNA, 20 bp, Felis catus
  source 1..20: mol_type = unassigned DNA
agtagcattgacttttgtga

SEQ ID NO: 745 - DNA, 20 bp, Felis catus
  source 1..20: mol_type = unassigned DNA
atattcgttgatggctatct

SEQ ID NO: 746 - DNA, 20 bp, Felis catus
  source 1..20: mol_type = unassigned DNA
caaagaagcagaaaatggtg

SEQ ID NO: 747 - DNA, 20 bp, Felis catus
  source 1..20: mol_type = unassigned DNA
cacacgtgcaagtgggggag

SEQ ID NO: 748 - DNA, 20 bp, Felis catus
  source 1..20: mol_type = unassigned DNA
cacagacacggggcacccgg

SEQ ID NO: 749 - DNA, 20 bp, Felis catus
  source 1..20: mol_type = unassigned DNA
cacgcgcaacgtgaaggttg

SEQ ID NO: 750 - DNA, 20 bp, Felis catus
  source 1..20: mol_type = unassigned DNA
cagaaaatggtggggcgcct

SEQ ID NO: 751 - DNA, 20 bp, Felis catus
  source 1..20: mol_type = unassigned DNA
cagaagctccaaaggcctgt

SEQ ID NO: 752 - DNA, 20 bp, Felis catus
  source 1..20: mol_type = unassigned DNA
cagaccgatttctggagaga

SEQ ID NO: 753 - DNA, 20 bp, Felis catus
  source 1..20: mol_type = unassigned DNA
caggaggatggggctcagaa

SEQ ID NO: 754 - DNA, 20 bp, Felis catus
  source 1..20: mol_type = unassigned DNA
catcttgacgcccagctctt

SEQ ID NO: 755 - DNA, 20 bp, Felis catus
  source 1..20: mol_type = unassigned DNA
ccaaagaagcagaaaatggt

SEQ ID NO: 756 - DNA, 20 bp, Felis catus
  source 1..20: mol_type = unassigned DNA
ccagaagcttcccaaagcca

SEQ ID NO: 757 - DNA, 20 bp, Felis catus
  source 1..20: mol_type = unassigned DNA
cccacgcacctgtgccagga

SEQ ID NO: 758 - DNA, 20 bp, Felis catus
  source 1..20: mol_type = unassigned DNA
cccgcacagaacacagacac

SEQ ID NO: 759 - DNA, 20 bp, Felis catus
  source 1..20: mol_type = unassigned DNA
ccgcacagaacacagacacg

SEQ ID NO: 760 - DNA, 20 bp, Felis catus
  source 1..20: mol_type = unassigned DNA
cctgccaggatgacatttaa

SEQ ID NO: 761 - DNA, 20 bp, Felis catus
  source 1..20: mol_type = unassigned DNA
ccttaaggaagtaaatgcct

SEQ ID NO: 762 - DNA, 20 bp, Felis catus
  source 1..20: mol_type = unassigned DNA
cgcttgcacacgtgcaagtg

SEQ ID NO: 763 - DNA, 20 bp, Felis catus
  source 1..20: mol_type = unassigned DNA
ctacaaatcactccctacta

SEQ ID NO: 764 - DNA, 20 bp, Felis catus
  source 1..20: mol_type = unassigned DNA
ctacgactaaaaacatcagg

SEQ ID NO: 765 - DNA, 20 bp, Felis catus
  source 1..20: mol_type = unassigned DNA
cttctgtggtgatgaatcct

SEQ ID NO: 766 - DNA, 20 bp, Felis catus
  source 1..20: mol_type = unassigned DNA
gaaatacactgaccagccct

SEQ ID NO: 767 - DNA, 20 bp, Felis catus
  source 1..20: mol_type = unassigned DNA
gaagaggagaagattctgga

SEQ ID NO: 768 - DNA, 20 bp, Felis catus
  source 1..20: mol_type = unassigned DNA
gacccctgaccggtgcctcc

SEQ ID NO: 769 - DNA, 20 bp, Felis catus
  source 1..20: mol_type = unassigned DNA
gagcaactcacatatatcca

SEQ ID NO: 770 - DNA, 20 bp, Felis catus
  source 1..20: mol_type = unassigned DNA
gagtcacccttaaattgcca

SEQ ID NO: 771 - DNA, 20 bp, Felis catus
  source 1..20: mol_type = unassigned DNA
gattctggagggcgcgatgg

SEQ ID NO: 772 - DNA, 20 bp, Felis catus
  source 1..20: mol_type = unassigned DNA
gcacacgtgcaagtggggga

SEQ ID NO: 773 - DNA, 20 bp, Felis catus
  source 1..20: mol_type = unassigned DNA
gcacgcgcaacgtgaaggtt

SEQ ID NO: 774 - DNA, 20 bp, Felis catus
  source 1..20: mol_type = unassigned DNA
gccatcaaggtgggcacaag

SEQ ID NO: 775 - DNA, 20 bp, Felis catus
  source 1..20: mol_type = unassigned DNA
gcgcgatgggggctgggcct

SEQ ID NO: 776 - DNA, 20 bp, Felis catus
  source 1..20: mol_type = unassigned DNA
gcgcttgcacacgtgcaagt

SEQ ID NO: 777 - DNA, 20 bp, Felis catus
  source 1..20: mol_type = unassigned DNA
gctccaaaggcctgtgggca

SEQ ID NO: 778 - DNA, 20 bp, Felis catus
  source 1..20: mol_type = unassigned DNA
gcttgcacacgtgcaagtgg

SEQ ID NO: 779 - DNA, 20 bp, Felis catus
  source 1..20: mol_type = unassigned DNA
ggaatagcagccatcaaggt

SEQ ID NO: 780 - DNA, 20 bp, Felis catus
  source 1..20: mol_type = unassigned DNA
ggagtctgaacaaccagtga

SEQ ID NO: 781 - DNA, 20 bp, Felis catus
  source 1..20: mol_type = unassigned DNA
ggcagggacctggcacatgt

SEQ ID NO: 782 - DNA, 20 bp, Felis catus
  source 1..20: mol_type = unassigned DNA
gggagagagtaagacgagga

SEQ ID NO: 783 - DNA, 20 bp, Felis catus
  source 1..20: mol_type = unassigned DNA
gggcatgtaggcctcctcaa

SEQ ID NO: 784 - DNA, 20 bp, Felis catus
  source 1..20: mol_type = unassigned DNA
ggggcaaggtagctgagtct

SEQ ID NO: 785 - DNA, 20 bp, Felis catus
  source 1..20: mol_type = unassigned DNA
gggggctgggcctgggtgag

SEQ ID NO: 786 - DNA, 20 bp, Felis catus
  source 1..20: mol_type = unassigned DNA
gggtggctccctcaaccctt

SEQ ID NO: 787 - DNA, 20 bp, Felis catus
  source 1..20: mol_type = unassigned DNA
gtaaggtaattcgcacacaa

SEQ ID NO: 788 - DNA, 20 bp, Felis catus
  source 1..20: mol_type = unassigned DNA
gtagctaggagctgcctcga

SEQ ID NO: 789 - DNA, 20 bp, Felis catus
  source 1..20: mol_type = unassigned DNA
gtcatgatctcacagtttgt

SEQ ID NO: 790 - DNA, 20 bp, Felis catus
  source 1..20: mol_type = unassigned DNA
gtggatcaagccctgagaat

SEQ ID NO: 791 - DNA, 20 bp, Felis catus
  source 1..20: mol_type = unassigned DNA
gtgggggaggggcagagaga

SEQ ID NO: 792 - DNA, 20 bp, Felis catus
  source 1..20: mol_type = unassigned DNA
gtgtggtagaagaacaggct

SEQ ID NO: 793 - DNA, 20 bp, Felis catus
  source 1..20: mol_type = unassigned DNA
taaaggagtgagatagagca

SEQ ID NO: 794 - DNA, 20 bp, Felis catus
  source 1..20: mol_type = unassigned DNA
taagtcctggagataagtat

SEQ ID NO: 795 - DNA, 20 bp, Felis catus
  source 1..20: mol_type = unassigned DNA
tacaaatcactccctactag

SEQ ID NO: 796 - DNA, 20 bp, Felis catus
  source 1..20: mol_type = unassigned DNA
tacgactaaaaacatcaggg

SEQ ID NO: 797 - DNA, 20 bp, Felis catus
  source 1..20: mol_type = unassigned DNA
tctacgactaaaaacatcag

SEQ ID NO: 798 - DNA, 20 bp, Felis catus
  source 1..20: mol_type = unassigned DNA
tgaacaatcccatgtgccct

SEQ ID NO: 799 - DNA, 20 bp, Felis catus
  source 1..20: mol_type = unassigned DNA
tggagggcgcgatgggggct

SEQ ID NO: 800 - DNA, 20 bp, Felis catus
  source 1..20: mol_type = unassigned DNA
tgggggctgggcctgggtga

SEQ ID NO: 801 - DNA, 20 bp, Felis catus
  source 1..20: mol_type = unassigned DNA
ttcctgggaagagagtctga

SEQ ID NO: 802 - DNA, 20 bp, Felis catus
  source 1..20: mol_type = unassigned DNA
ttctacgactaaaaacatca

SEQ ID NO: 803 - DNA, 20 bp, Felis catus
  source 1..20: mol_type = unassigned DNA
ttctgtggtgatgaatcctg

SEQ ID NO: 804 - DNA, 20 bp, Felis catus
  source 1..20: mol_type = unassigned DNA
aaaaaagacgtcataaaaaa

SEQ ID NO: 805 - DNA, 20 bp, Felis catus
  source 1..20: mol_type = unassigned DNA
aaaatggtggggcgcctggg

SEQ ID NO: 806 - DNA, 20 bp, Felis catus
  source 1..20: mol_type = unassigned DNA
aaagccagggagtcccttcc

SEQ ID NO: 807 - DNA, 20 bp, Felis catus
  source 1..20: mol_type = unassigned DNA
aacccttgggctgttaagag

SEQ ID NO: 808 - DNA, 20 bp, Felis catus
  source 1..20: mol_type = unassigned DNA
aacctgtttggagatcacca

SEQ ID NO: 809 - DNA, 20 bp, Felis catus
  source 1..20: mol_type = unassigned DNA
aaggcctgtgggcagggacc

SEQ ID NO: 810 - DNA, 20 bp, Felis catus
  source 1..20: mol_type = unassigned DNA
aatattcgttgatggctatc

SEQ ID NO: 811 - DNA, 20 bp, Felis catus
  source 1..20: mol_type = unassigned DNA
aatctaggaaagtagtttat

SEQ ID NO: 812 - DNA, 20 bp, Felis catus
  source 1..20: mol_type = unassigned DNA
acaacatttttatccttctg

SEQ ID NO: 813 - DNA, 20 bp, Felis catus
  source 1..20: mol_type = unassigned DNA
accaaagaagcagaaaatgg

SEQ ID NO: 814 - DNA, 20 bp, Felis catus
  source 1..20: mol_type = unassigned DNA
acccatgcaatattcgttga

SEQ ID NO: 815 - DNA, 20 bp, Felis catus
  source 1..20: mol_type = unassigned DNA
accttaactgctgcagtctg

SEQ ID NO: 816 - DNA, 20 bp, Felis catus
  source 1..20: mol_type = unassigned DNA
actccaagtagctccaggtt

SEQ ID NO: 817 - DNA, 20 bp, Felis catus
  source 1..20: mol_type = unassigned DNA
actcttgaggacaaagctct

SEQ ID NO: 818 - DNA, 20 bp, Felis catus
  source 1..20: mol_type = unassigned DNA
acttaatcccaagaggaggt

SEQ ID NO: 819 - DNA, 20 bp, Felis catus
  source 1..20: mol_type = unassigned DNA
agaaatacactgaccagccc

SEQ ID NO: 820 - DNA, 20 bp, Felis catus
  source 1..20: mol_type = unassigned DNA
agagttggaaatatgctacg

SEQ ID NO: 821 - DNA, 20 bp, Felis catus
  source 1..20: mol_type = unassigned DNA
agcgcttgcacacgtgcaag

SEQ ID NO: 822 - DNA, 20 bp, Felis catus
  source 1..20: mol_type = unassigned DNA
aggaatagcagccatcaagg

SEQ ID NO: 823 - DNA, 20 bp, Felis catus
  source 1..20: mol_type = unassigned DNA
agggacctggcacatgtggg

SEQ ID NO: 824 - DNA, 20 bp, Felis catus
  source 1..20: mol_type = unassigned DNA
aggggcaaggtagctgagtc

SEQ ID NO: 825 - DNA, 20 bp, Felis catus
  source 1..20: mol_type = unassigned DNA
atgtaggcctcctcaagggc

SEQ ID NO: 826 - DNA, 20 bp, Felis catus
  source 1..20: mol_type = unassigned DNA
attaggtgaggacaggtgtc

SEQ ID NO: 827 - DNA, 20 bp, Felis catus
  source 1..20: mol_type = unassigned DNA
caaaagaaataacattgtat

SEQ ID NO: 828 - DNA, 20 bp, Felis catus
  source 1..20: mol_type = unassigned DNA
caaagctcttggagaggatg

SEQ ID NO: 829 - DNA, 20 bp, Felis catus
  source 1..20: mol_type = unassigned DNA
caacagtaattcatttccat

SEQ ID NO: 830 - DNA, 20 bp, Felis catus
  source 1..20: mol_type = unassigned DNA
caggcaccagaacaacagag

SEQ ID NO: 831 - DNA, 20 bp, Felis catus
  source 1..20: mol_type = unassigned DNA
ccagaagctccaaaggcctg

SEQ ID NO: 832 - DNA, 20 bp, Felis catus
  source 1..20: mol_type = unassigned DNA
ccagctgccgcttaactttg

SEQ ID NO: 833 - DNA, 20 bp, Felis catus
  source 1..20: mol_type = unassigned DNA
ccatcttgacgcccagctct

SEQ ID NO: 834 - DNA, 20 bp, Felis catus
  source 1..20: mol_type = unassigned DNA
ccatgtagcccctgactgca

SEQ ID NO: 835 - DNA, 20 bp, Felis catus
  source 1..20: mol_type = unassigned DNA
cccttaaggaagtaaatgcc

SEQ ID NO: 836 - DNA, 20 bp, Felis catus
  source 1..20: mol_type = unassigned DNA
ccttctgtggtgatgaatcc

SEQ ID NO: 837 - DNA, 20 bp, Felis catus
  source 1..20: mol_type = unassigned DNA
cgcgatcagtcagaccagga

SEQ ID NO: 838 - DNA, 20 bp, Felis catus
  source 1..20: mol_type = unassigned DNA
cgtgtggtagaagaacaggc

SEQ ID NO: 839 - DNA, 20 bp, Felis catus
  source 1..20: mol_type = unassigned DNA
cgttctccacgtagcaatcc

SEQ ID NO: 840 - DNA, 20 bp, Felis catus
  source 1..20: mol_type = unassigned DNA
ctagcccacagaccgatttc

SEQ ID NO: 841 - DNA, 20 bp, Felis catus
  source 1..20: mol_type = unassigned DNA
ctccttccctcaaactatcc

SEQ ID NO: 842 - DNA, 20 bp, Felis catus
  source 1..20: mol_type = unassigned DNA
ctcttatgtccattgtgagt

SEQ ID NO: 843 - DNA, 20 bp, Felis catus
  source 1..20: mol_type = unassigned DNA
ctgactgcatggtctgtatg

SEQ ID NO: 844 - DNA, 20 bp, Felis catus
  source 1..20: mol_type = unassigned DNA
ctggagggcgcgatgggggc

SEQ ID NO: 845 - DNA, 20 bp, Felis catus
  source 1..20: mol_type = unassigned DNA
ctttgtggctagaacctgtt

SEQ ID NO: 846 - DNA, 20 bp, Felis catus
  source 1..20: mol_type = unassigned DNA
gaaacattagtgaatagttg

SEQ ID NO: 847 - DNA, 20 bp, Felis catus
  source 1..20: mol_type = unassigned DNA
gaacaggctgggtgtgcaca

SEQ ID NO: 848 - DNA, 20 bp, Felis catus
  source 1..20: mol_type = unassigned DNA
gaagaactttctctttcctg

SEQ ID NO: 849 - DNA, 20 bp, Felis catus
  source 1..20: mol_type = unassigned DNA
gaagattctggagggcgcga

SEQ ID NO: 850 - DNA, 20 bp, Felis catus
  source 1..20: mol_type = unassigned DNA
gaatgggtggacaccatcct

SEQ ID NO: 851 - DNA, 20 bp, Felis catus
  source 1..20: mol_type = unassigned DNA
gactagtccatccaagaccc

SEQ ID NO: 852 - DNA, 20 bp, Felis catus
  source 1..20: mol_type = unassigned DNA
gactcatctgtcaggtgtac

SEQ ID NO: 853 - DNA, 20 bp, Felis catus
  source 1..20: mol_type = unassigned DNA
gagagttcctgcagaaaggt

SEQ ID NO: 854 - DNA, 20 bp, Felis catus
  source 1..20: mol_type = unassigned DNA
gatcaagccctgagaatggg

SEQ ID NO: 855 - DNA, 20 bp, Felis catus
  source 1..20: mol_type = unassigned DNA
gcaagaagaggagaagattc

SEQ ID NO: 856 - DNA, 20 bp, Felis catus
  source 1..20: mol_type = unassigned DNA
gcaatcctggatttttttca

SEQ ID NO: 857 - DNA, 20 bp, Felis catus
  source 1..20: mol_type = unassigned DNA
gcagaaaatggtggggcgcc

SEQ ID NO: 858 - DNA, 20 bp, Felis catus
  source 1..20: mol_type = unassigned DNA
gcagaacccaagaacagcag

SEQ ID NO: 859 - DNA, 20 bp, Felis catus
  source 1..20: mol_type = unassigned DNA
gctgtgacaaatgccagagt

SEQ ID NO: 860 - DNA, 20 bp, Felis catus
  source 1..20: mol_type = unassigned DNA
ggacagaagacctgagcgca

SEQ ID NO: 861 - DNA, 20 bp, Felis catus
  source 1..20: mol_type = unassigned DNA
ggcgcgatgggggctgggcc

SEQ ID NO: 862 - DNA, 20 bp, Felis catus
  source 1..20: mol_type = unassigned DNA
gggcagggacctggcacatg

SEQ ID NO: 863 - DNA, 20 bp, Felis catus
  source 1..20: mol_type = unassigned DNA
ggggggttctgcaggactcc

SEQ ID NO: 864 - DNA, 20 bp, Felis catus
  source 1..20: mol_type = unassigned DNA
ggtactctcccttaaggagg

SEQ ID NO: 865 - DNA, 20 bp, Felis catus
  source 1..20: mol_type = unassigned DNA
ggtcatgatctcacagtttg

SEQ ID NO: 866 - DNA, 20 bp, Felis catus
  source 1..20: mol_type = unassigned DNA
gtgaacaatcccatgtgccc

SEQ ID NO: 867 - DNA, 20 bp, Felis catus
  source 1..20: mol_type = unassigned DNA
taaagaacaggacaggagga

SEQ ID NO: 868 - DNA, 20 bp, Felis catus
  source 1..20: mol_type = unassigned DNA
taggggagtctcaggacgct

SEQ ID NO: 869 - DNA, 20 bp, Felis catus
  source 1..20: mol_type = unassigned DNA
tcagaacctggagcctgctt

SEQ ID NO: 870 - DNA, 20 bp, Felis catus
  source 1..20: mol_type = unassigned DNA
tcgcacacaagggacacgtg

SEQ ID NO: 871 - DNA, 20 bp, Felis catus
  source 1..20: mol_type = unassigned DNA
tctaccaaagaagcagaaaa

SEQ ID NO: 872 - DNA, 20 bp, Felis catus
  source 1..20: mol_type = unassigned DNA
tgcacgcgcaacgtgaaggt

SEQ ID NO: 873 - DNA, 20 bp, Felis catus
  source 1..20: mol_type = unassigned DNA
tgcactgacagctcagaacc

SEQ ID NO: 874 - DNA, 20 bp, Felis catus
  source 1..20: mol_type = unassigned DNA
tgggtggctccctcaaccct

SEQ ID NO: 875 - DNA, 20 bp, Felis catus
  source 1..20: mol_type = unassigned DNA
tgtcaggtgtactggatgta

SEQ ID NO: 876 - DNA, 20 bp, Felis catus
  source 1..20: mol_type = unassigned DNA
tgtggatcaagccctgagaa

SEQ ID NO: 877 - DNA, 20 bp, Felis catus
  source 1..20: mol_type = unassigned DNA
ttaagtcctggagataagta

SEQ ID NO: 878 - DNA, 20 bp, Felis catus
  source 1..20: mol_type = unassigned DNA
ttattgaaggaaactcccag

SEQ ID NO: 879 - DNA, 20 bp, Felis catus
  source 1..20: mol_type = unassigned DNA
ttgtgcccaagtttaagtcc

SEQ ID NO: 880 - DNA, 20 bp, Felis catus
  source 1..20: mol_type = unassigned DNA
tttctttgccaaagaccaac

SEQ ID NO: 881 - DNA, 20 bp, Felis catus
  source 1..20: mol_type = unassigned DNA
tttttcatggctgttctctc

SEQ ID NO: 882 - DNA, 20 bp, Felis catus
  source 1..20: mol_type = unassigned DNA
aacagccatgaaaaaaatcc

SEQ ID NO: 883 - DNA, 20 bp, Felis catus
  source 1..20: mol_type = unassigned DNA
aaccaggatagtttgaggga

SEQ ID NO: 884 - DNA, 20 bp, Felis catus
  source 1..20: mol_type = unassigned DNA
aactactttcctagattaga

SEQ ID NO: 885 - DNA, 20 bp, Felis catus
  source 1..20: mol_type = unassigned DNA
aagcagtcctgggagtgggc

SEQ ID NO: 886 - DNA, 20 bp, Felis catus
  source 1..20: mol_type = unassigned DNA
aatcacatacatgtaacccc

SEQ ID NO: 887 - DNA, 20 bp, Felis catus
  source 1..20: mol_type = unassigned DNA
aatgtcaccctggcaattta

SEQ ID NO: 888 - DNA, 20 bp, Felis catus
  source 1..20: mol_type = unassigned DNA
acacctgacagatgagtctc

SEQ ID NO: 889 - DNA, 20 bp, Felis catus
  source 1..20: mol_type = unassigned DNA
acttccttctgtatcaattc

SEQ ID NO: 890 - DNA, 20 bp, Felis catus
  source 1..20: mol_type = unassigned DNA
agagagagagaatccaaagc

SEQ ID NO: 891 - DNA, 20 bp, Felis catus
  source 1..20: mol_type = unassigned DNA
agagcatggggactggaggc

SEQ ID NO: 892 - DNA, 20 bp, Felis catus
  source 1..20: mol_type = unassigned DNA
agagctttgtcctcaagagt

SEQ ID NO: 893 - DNA, 20 bp, Felis catus
  source 1..20: mol_type = unassigned DNA
agatgggtgagagcagatgg

SEQ ID NO: 894 - DNA, 20 bp, Felis catus
  source 1..20: mol_type = unassigned DNA
agcaccccatacttatctcc

SEQ ID NO: 895 - DNA, 20 bp, Felis catus
  source 1..20: mol_type = unassigned DNA
agccttgtcagttctggtgg

SEQ ID NO: 896 - DNA, 20 bp, Felis catus
  source 1..20: mol_type = unassigned DNA
agcgttaccagcccttgagg

SEQ ID NO: 897 - DNA, 20 bp, Felis catus
  source 1..20: mol_type = unassigned DNA
agctaccttgcccctcaccc

SEQ ID NO: 898 - DNA, 20 bp, Felis catus
  source 1..20: mol_type = unassigned DNA
aggcaggctggggtgcccgg

SEQ ID NO: 899 - DNA, 20 bp, Felis catus
  source 1..20: mol_type = unassigned DNA
agggagaggtttggagatgg

SEQ ID NO: 900 - DNA, 20 bp, Felis catus
  source 1..20: mol_type = unassigned DNA
agggagtgatttgtagccca

SEQ ID NO: 901 - DNA, 20 bp, Felis catus
  source 1..20: mol_type = unassigned DNA
agtgggcaggtctctgcgga

SEQ ID NO: 902 - DNA, 20 bp, Felis catus
  source 1..20: mol_type = unassigned DNA
agtttgagggaaggagtagc

SEQ ID NO: 903 - DNA, 20 bp, Felis catus
  source 1..20: mol_type = unassigned DNA
atcactggggatgaggcatg

SEQ ID NO: 904 - DNA, 20 bp, Felis catus
  source 1..20: mol_type = unassigned DNA
attaagtttactgatggagg

SEQ ID NO: 905 - DNA, 20 bp, Felis catus
  source 1..20: mol_type = unassigned DNA
attgagagcatggggactgg

SEQ ID NO: 906 - DNA, 20 bp, Felis catus
  source 1..20: mol_type = unassigned DNA
atttttcttgttgcacagtt

SEQ ID NO: 907 - DNA, 20 bp, Felis catus
  source 1..20: mol_type = unassigned DNA
caaaatggggattaagtgtg

SEQ ID NO: 908 - DNA, 20 bp, Felis catus
  source 1..20: mol_type = unassigned DNA
cacatacagaccatgcagtc

SEQ ID NO: 909 - DNA, 20 bp, Felis catus
  source 1..20: mol_type = unassigned DNA
cacctaattcactctcaatc

SEQ ID NO: 910 - DNA, 20 bp, Felis catus
  source 1..20: mol_type = unassigned DNA
cagcagttaaggtgttcaag

SEQ ID NO: 911 - DNA, 20 bp, Felis catus
  source 1..20: mol_type = unassigned DNA
cagctcaggtcatgatctca

SEQ ID NO: 912 - DNA, 20 bp, Felis catus
  source 1..20: mol_type = unassigned DNA
cagctgggagatcattgtcc

SEQ ID NO: 913 - DNA, 20 bp, Felis catus
  source 1..20: mol_type = unassigned DNA
cattcagctcctgcacatgt

SEQ ID NO: 914 - DNA, 20 bp, Felis catus
  source 1..20: mol_type = unassigned DNA
ccaggattcatcaccacaga

SEQ ID NO: 915 - DNA, 20 bp, Felis catus
  source 1..20: mol_type = unassigned DNA
cccaggcatttacttcctta

SEQ ID NO: 916 - DNA, 20 bp, Felis catus
  source 1..20: mol_type = unassigned DNA
cccttaaatgtcatcctggc

SEQ ID NO: 917 - DNA, 20 bp, Felis catus
  source 1..20: mol_type = unassigned DNA
cctgggtggctcagtcggtt

SEQ ID NO: 918 - DNA, 20 bp, Felis catus
  source 1..20: mol_type = unassigned DNA
cgtaggatttttttctttct

SEQ ID NO: 919 - DNA, 20 bp, Felis catus
  source 1..20: mol_type = unassigned DNA
cgtcctgagactcccctagt

SEQ ID NO: 920 - DNA, 20 bp, Felis catus
  source 1..20: mol_type = unassigned DNA
ctcagactctcttcccagga

SEQ ID NO: 921 - DNA, 20 bp, Felis catus
  source 1..20: mol_type = unassigned DNA
ctctcaagtggcgggcaaac

SEQ ID NO: 922 - DNA, 20 bp, Felis catus
  source 1..20: mol_type = unassigned DNA
ctctgctgattcttttgtga

SEQ ID NO: 923 - DNA, 20 bp, Felis catus
  source 1..20: mol_type = unassigned DNA
ctctgttgttctggtgcctg

SEQ ID NO: 924 - DNA, 20 bp, Felis catus
  source 1..20: mol_type = unassigned DNA
ctgatggaggagggtgagac

SEQ ID NO: 925 - DNA, 20 bp, Felis catus
  source 1..20: mol_type = unassigned DNA
cttaaacttgggcacaagta

SEQ ID NO: 926 - DNA, 20 bp, Felis catus
  source 1..20: mol_type = unassigned DNA
cttaagggtgagagggaagc

SEQ ID NO: 927 - DNA, 20 bp, Felis catus
  source 1..20: mol_type = unassigned DNA
cttacgcacagttggaaaat

SEQ ID NO: 928 - DNA, 20 bp, Felis catus
  source 1..20: mol_type = unassigned DNA
cttatttgaaaggccgaaac

SEQ ID NO: 929 - DNA, 20 bp, Felis catus
  source 1..20: mol_type = unassigned DNA
ctttgtcctcaagagtagga

SEQ ID NO: 930 - DNA, 20 bp, Felis catus
  source 1..20: mol_type = unassigned DNA
gaaatcggtctgtgggctag

SEQ ID NO: 931 - DNA, 20 bp, Felis catus
  source 1..20: mol_type = unassigned DNA
gactggaggcaggctgaatc

SEQ ID NO: 932 - DNA, 20 bp, Felis catus
  source 1..20: mol_type = unassigned DNA
gagaatccaaagcaggctcc

SEQ ID NO: 933 - DNA, 20 bp, Felis catus
  source 1..20: mol_type = unassigned DNA
gagagcagatggagggacag

SEQ ID NO: 934 - DNA, 20 bp, Felis catus
  source 1..20: mol_type = unassigned DNA
gagagtgcacacaagtggga

SEQ ID NO: 935 - DNA, 20 bp, Felis catus
  source 1..20: mol_type = unassigned DNA
gagatcctgggacatggcaa

SEQ ID NO: 936 - DNA, 20 bp, Felis catus
  source 1..20: mol_type = unassigned DNA
gagcggaatcactggggatg

SEQ ID NO: 937 - DNA, 20 bp, Felis catus
  source 1..20: mol_type = unassigned DNA
gaggaggccaacctttctgc

SEQ ID NO: 938 - DNA, 20 bp, Felis catus
  source 1..20: mol_type = unassigned DNA
gagtatcgcatttgggaacc

SEQ ID NO: 939 - DNA, 20 bp, Felis catus
  source 1..20: mol_type = unassigned DNA
gatagcgctgccatgcgctc

SEQ ID NO: 940 - DNA, 20 bp, Felis catus
  source 1..20: mol_type = unassigned DNA
gatggtgtccacccattctc

SEQ ID NO: 941 - DNA, 20 bp, Felis catus
  source 1..20: mol_type = unassigned DNA
gcagtcaggggctacatggc

SEQ ID NO: 942 - DNA, 20 bp, Felis catus
  source 1..20: mol_type = unassigned DNA
gctacgtgcagctgcacccc

SEQ ID NO: 943 - DNA, 20 bp, Felis catus
  source 1..20: mol_type = unassigned DNA
ggaagcgtgggaggcctggc

SEQ ID NO: 944 - DNA, 20 bp, Felis catus
  source 1..20: mol_type = unassigned DNA
ggagctacttggagtcaaga

SEQ ID NO: 945 - DNA, 20 bp, Felis catus
  source 1..20: mol_type = unassigned DNA
gggaaggagtagcaggaaac

SEQ ID NO: 946 - DNA, 20 bp, Felis catus
  source 1..20: mol_type = unassigned DNA
gggagccacccacatgtgcc

SEQ ID NO: 947 - DNA, 20 bp, Felis catus
  source 1..20: mol_type = unassigned DNA
gggattaagtttactgatgg

SEQ ID NO: 948 - DNA, 20 bp, Felis catus
  source 1..20: mol_type = unassigned DNA
gggggtgtgggctgggctta

SEQ ID NO: 949 - DNA, 20 bp, Felis catus
  source 1..20: mol_type = unassigned DNA
ggtagtggtgcttatttgaa

SEQ ID NO: 950 - DNA, 20 bp, Felis catus
  source 1..20: mol_type = unassigned DNA
ggtgcccggaggcaccggtc

SEQ ID NO: 951 - DNA, 20 bp, Felis catus
  source 1..20: mol_type = unassigned DNA
ggtgtcagaattgcaggagt

SEQ ID NO: 952 - DNA, 20 bp, Felis catus
  source 1..20: mol_type = unassigned DNA
gtaggattttagccttccac

SEQ ID NO: 953 - DNA, 20 bp, Felis catus
  source 1..20: mol_type = unassigned DNA
gtgagttcgagcggggcatc

SEQ ID NO: 954 - DNA, 20 bp, Felis catus
  source 1..20: mol_type = unassigned DNA
gtggaggaatattgaaacta

SEQ ID NO: 955 - DNA, 20 bp, Felis catus
  source 1..20: mol_type = unassigned DNA
gtgggctagaggttcttgct

SEQ ID NO: 956 - DNA, 20 bp, Felis catus
  source 1..20: mol_type = unassigned DNA
gttcggggtgtcagaattgc

SEQ ID NO: 957 - DNA, 20 bp, Felis catus
  source 1..20: mol_type = unassigned DNA
taaggtgttcaagaggcttg

SEQ ID NO: 958 - DNA, 20 bp, Felis catus
  source 1..20: mol_type = unassigned DNA
tagaaagcgtgttgactcgt

SEQ ID NO: 959 - DNA, 20 bp, Felis catus
  source 1..20: mol_type = unassigned DNA
tagagcgttaccagcccttg

SEQ ID NO: 960 - DNA, 20 bp, Felis catus
  source 1..20: mol_type = unassigned DNA
taggtgactgacttcagctc

SEQ ID NO: 961 - DNA, 20 bp, Felis catus
  source 1..20: mol_type = unassigned DNA
tagtcgtagaatggagggag

SEQ ID NO: 962 - DNA, 20 bp, Felis catus
  source 1..20: mol_type = unassigned DNA
tcattagttgtgcacacaat

SEQ ID NO: 963 - DNA, 20 bp, Felis catus
  source 1..20: mol_type = unassigned DNA
tccacagactgcagcagtta

SEQ ID NO: 964 - DNA, 20 bp, Felis catus
  source 1..20: mol_type = unassigned DNA
tcccatggtgatctccaaac

SEQ ID NO: 965 - DNA, 20 bp, Felis catus
  source 1..20: mol_type = unassigned DNA
tcctgggacatggcaaaggg

SEQ ID NO: 966 - DNA, 20 bp, Felis catus
  source 1..20: mol_type = unassigned DNA
tctggtgcctgaggccctcg

SEQ ID NO: 967 - DNA, 20 bp, Felis catus
  source 1..20: mol_type = unassigned DNA
tcttaacagcccaagggttg

SEQ ID NO: 968 - DNA, 20 bp, Felis catus
  source 1..20: mol_type = unassigned DNA
tctttggtagatgtcttctg

SEQ ID NO: 969 - DNA, 20 bp, Felis catus
  source 1..20: mol_type = unassigned DNA
tgacagatgagtctcaggtg

SEQ ID NO: 970 - DNA, 20 bp, Felis catus
  source 1..20: mol_type = unassigned DNA
tgccctcagactctcttccc

SEQ ID NO: 971 - DNA, 20 bp, Felis catus
  source 1..20: mol_type = unassigned DNA
tggagaacggactcttatcc

SEQ ID NO: 972 - DNA, 20 bp, Felis catus
  source 1..20: mol_type = unassigned DNA
tggcaatttaagggtgactc

SEQ ID NO: 973 - DNA, 20 bp, Felis catus
  source 1..20: mol_type = unassigned DNA
tgtgccaggtccctgcccac

SEQ ID NO: 974 - DNA, 20 bp, Felis catus
  source 1..20: mol_type = unassigned DNA
tgtttttagtcgtagaatgg

SEQ ID NO: 975 - DNA, 20 bp, Felis catus
  source 1..20: mol_type = unassigned DNA
ttcagactccctcctggcac

SEQ ID NO: 976 - DNA, 20 bp, Felis catus
  source 1..20: mol_type = unassigned DNA
ttcccactcttaacagccca

SEQ ID NO: 977 - DNA, 20 bp, Felis catus
  source 1..20: mol_type = unassigned DNA
ttctagcagctgacacgatg

SEQ ID NO: 978 - DNA, 20 bp, Felis catus
  source 1..20: mol_type = unassigned DNA
ttctgtgcgggaagcgtggg

SEQ ID NO: 979 - DNA, 20 bp, Felis catus
  source 1..20: mol_type = unassigned DNA
ttgcatgactacgggcaccc

SEQ ID NO: 980 - DNA, 20 bp, Felis catus
  source 1..20: mol_type = unassigned DNA
ttggagtcaagaaggtgccc

SEQ ID NO: 981 - DNA, 20 bp, Felis catus
  source 1..20: mol_type = unassigned DNA
ttgggaaccaggatagtttg

SEQ ID NO: 982 - DNA, 20 bp, Felis catus
  source 1..20: mol_type = unassigned DNA
ttggtagatgtcttctgagg

SEQ ID NO: 983 - DNA, 20 bp, Felis catus
  source 1..20: mol_type = unassigned DNA
tttaaccgactgagccaccc

SEQ ID NO: 984 - DNA, 20 bp, Felis catus
  source 1..20: mol_type = unassigned DNA
tttacttccttaagggtgag

SEQ ID NO: 985 - DNA, 20 bp, Felis catus
  source 1..20: mol_type = unassigned DNA
tttgaaaggccgaaacaggc

SEQ ID NO: 986 - DNA, 20 bp, Felis catus
  source 1..20: mol_type = unassigned DNA
aacaggcaggctggggtgcc

SEQ ID NO: 987 - DNA, 20 bp, Felis catus
  source 1..20: mol_type = unassigned DNA
caggattgctacgtggagaa

SEQ ID NO: 988 - DNA, 20 bp, Felis catus
  source 1..20: mol_type = unassigned DNA
catcctggtctgactgatcg

SEQ ID NO: 989 - DNA, 20 bp, Felis catus
  source 1..20: mol_type = unassigned DNA
ccccgtgtctgtgttctgtg

SEQ ID NO: 990 - DNA, 20 bp, Felis catus
  source 1..20: mol_type = unassigned DNA
ctagaggttcttgctaggga

SEQ ID NO: 991 - DNA, 20 bp, Felis catus
  source 1..20: mol_type = unassigned DNA
ctgttcttgggttctgccag

SEQ ID NO: 992 - DNA, 20 bp, Felis catus
  source 1..20: mol_type = unassigned DNA
gaatcaggagcacatgtgag

SEQ ID NO: 993 - DNA, 20 bp, Felis catus
  source 1..20: mol_type = unassigned DNA
gatttttttctttctaggtt

SEQ ID NO: 994 - DNA, 20 bp, Felis catus
  source 1..20: mol_type = unassigned DNA
gcaccggtcaggggtctctc

SEQ ID NO: 995 - DNA, 20 bp, Felis catus
  source 1..20: mol_type = unassigned DNA
gcggccctctctccagaaat

SEQ ID NO: 996 - DNA, 20 bp, Felis catus
  source 1..20: mol_type = unassigned DNA
gctggggtgcccggaggcac

SEQ ID NO: 997 - DNA, 20 bp, Felis catus
  source 1..20: mol_type = unassigned DNA
ggaaaataggggactaatat

SEQ ID NO: 998 - DNA, 20 bp, Felis catus
  source 1..20: mol_type = unassigned DNA
ggttcttgctagggacggag

SEQ ID NO: 999 - DNA, 20 bp, Felis catus
  source 1..20: mol_type = unassigned DNA
gttctagccacaaagttaag

SEQ ID NO: 1000 - DNA, 20 bp, Felis catus
  source 1..20: mol_type = unassigned DNA
taactgcatcttagcacccc

SEQ ID NO: 1001 - DNA, 20 bp, Felis catus
  source 1..20: mol_type = unassigned DNA
tcaaggtttgtgagttcgag

SEQ ID NO: 1002 - DNA, 20 bp, Felis catus
  source 1..20: mol_type = unassigned DNA
tggaatttcttgcatgacta

SEQ ID NO: 1003 - DNA, 20 bp, Felis catus
  source 1..20: mol_type = unassigned DNA
tggcacaggtgcgtgggtga

SEQ ID NO: 1004 - DNA, 20 bp, Felis catus
  source 1..20: mol_type = unassigned DNA
tgggagtgggcaggtctctg

SEQ ID NO: 1005 - DNA, 20 bp, Felis catus
  source 1..20: mol_type = unassigned DNA
tgtcagtgcagagcctgaca

SEQ ID NO: 1006 - DNA, 20 bp, Felis catus
  source 1..20: mol_type = unassigned DNA
tgtgagttgctctcaagtgg

SEQ ID NO: 1007 - DNA, 20 bp, Felis catus
  source 1..20: mol_type = unassigned DNA
ttttctgtttgtgtcttcag

SEQ ID NO: 1008 - DNA, 20 bp, Felis catus
  source 1..20: mol_type = unassigned DNA
tttttatgacgtcttttttg

SEQ ID NO: 1009 - DNA, 20 bp, Felis catus
  source 1..20: mol_type = unassigned DNA
aactgcatcttagcaccccc

SEQ ID NO: 1010 - DNA, 20 bp, Felis catus
  source 1..20: mol_type = unassigned DNA
aaggccgaaacaggcaggct

SEQ ID NO: 1011 - DNA, 20 bp, Felis catus
  source 1..20: mol_type = unassigned DNA
aaggtttgtgagttcgagcg

SEQ ID NO: 1012 - DNA, 20 bp, Felis catus
  source 1..20: mol_type = unassigned DNA
aataggggagagttagttgg

SEQ ID NO: 1013 - DNA, 20 bp, Felis catus
  source 1..20: mol_type = unassigned DNA
acaataggggagagttagtt

SEQ ID NO: 1014 - DNA, 20 bp, Felis catus
  source 1..20: mol_type = unassigned DNA
acaggcctttggagcttctg

SEQ ID NO: 1015 - DNA, 20 bp, Felis catus
  source 1..20: mol_type = unassigned DNA
acaggtgcgtgggtgacggg

SEQ ID NO: 1016 - DNA, 20 bp, Felis catus
  source 1..20: mol_type = unassigned DNA
acatacagaccatgcagtca

SEQ ID NO: 1017 - DNA, 20 bp, Felis catus
  source 1..20: mol_type = unassigned DNA
actcaggtgatgacctgagt

SEQ ID NO: 1018 - DNA, 20 bp, Felis catus
  source 1..20: mol_type = unassigned DNA
agaaaatgttccgtctgtct

SEQ ID NO: 1019 - DNA, 20 bp, Felis catus
  source 1..20: mol_type = unassigned DNA
agagtgcacacaagtgggaa

SEQ ID NO: 1020 - DNA, 20 bp, Felis catus
  source 1..20: mol_type = unassigned DNA
agatcctgggacatggcaaa

SEQ ID NO: 1021 - DNA, 20 bp, Felis catus
  source 1..20: mol_type = unassigned DNA
agcagctgacacgatgaggg

SEQ ID NO: 1022 - DNA, 20 bp, Felis catus
  source 1..20: mol_type = unassigned DNA
aggccgaaacaggcaggctg

SEQ ID NO: 1023 - DNA, 20 bp, Felis catus
  source 1..20: mol_type = unassigned DNA
aggcctttggagcttctggg

SEQ ID NO: 1024 - DNA, 20 bp, Felis catus
  source 1..20: mol_type = unassigned DNA
agggacggagcggaatcact

SEQ ID NO: 1025 - DNA, 20 bp, Felis catus
  source 1..20: mol_type = unassigned DNA
aggtgcgtgggtgacggggg

SEQ ID NO: 1026 - DNA, 20 bp, Felis catus
  source 1..20: mol_type = unassigned DNA
agtaagtccaacctcctctt

SEQ ID NO: 1027 - DNA, 20 bp, Felis catus
  source 1..20: mol_type = unassigned DNA
atctcaagctgaacactttg

SEQ ID NO: 1028 - DNA, 20 bp, Felis catus
  source 1..20: mol_type = unassigned DNA
atgaggcatgaggtgatcct

SEQ ID NO: 1029 - DNA, 20 bp, Felis catus
  source 1..20: mol_type = unassigned DNA
atggtgtccacccattctca

SEQ ID NO: 1030 - DNA, 20 bp, Felis catus
  source 1..20: mol_type = unassigned DNA
atgtaagcagtcctgggagt

SEQ ID NO: 1031 - DNA, 20 bp, Felis catus
  source 1..20: mol_type = unassigned DNA
atgtcaccctggcaatttaa

SEQ ID NO: 1032 - DNA, 20 bp, Felis catus
  source 1..20: mol_type = unassigned DNA
atgtgctcattgagagcatg

SEQ ID NO: 1033 - DNA, 20 bp, Felis catus
  source 1..20: mol_type = unassigned DNA
attagttgtgcacacaatag

SEQ ID NO: 1034 - DNA, 20 bp, Felis catus
  source 1..20: mol_type = unassigned DNA
attcactaatgtttctggat

SEQ ID NO: 1035 - DNA, 20 bp, Felis catus
  source 1..20: mol_type = unassigned DNA
attctctcatctgcaaaatg

SEQ ID NO: 1036 - DNA, 20 bp, Felis catus
  source 1..20: mol_type = unassigned DNA
atttttttctttctaggttc

SEQ ID NO: 1037 - DNA, 20 bp, Felis catus
  source 1..20: mol_type = unassigned DNA
caagagctgggcgtcaagat

SEQ ID NO: 1038 - DNA, 20 bp, Felis catus
  source 1..20: mol_type = unassigned DNA
caaggtttgtgagttcgagc

SEQ ID NO: 1039 - DNA, 20 bp, Felis catus
  source 1..20: mol_type = unassigned DNA
caataggggagagttagttg

SEQ ID NO: 1040 - DNA, 20 bp, Felis catus
  source 1..20: mol_type = unassigned DNA
cacaaagttaagcggcagct

SEQ ID NO: 1041 - DNA, 20 bp, Felis catus
  source 1..20: mol_type = unassigned DNA
cacaggcctttggagcttct

SEQ ID NO: 1042 - DNA, 20 bp, Felis catus
  source 1..20: mol_type = unassigned DNA
cacaggtgcgtgggtgacgg

SEQ ID NO: 1043 - DNA, 20 bp, Felis catus
  source 1..20: mol_type = unassigned DNA
caggcctttggagcttctgg

SEQ ID NO: 1044 - DNA, 20 bp, Felis catus
  source 1..20: mol_type = unassigned DNA
caggggtgacagttggagct

SEQ ID NO: 1045 - DNA, 20 bp, Felis catus
  source 1..20: mol_type = unassigned DNA
caggtgcgtgggtgacgggg

SEQ ID NO: 1046 - DNA, 20 bp, Felis catus
  source 1..20: mol_type = unassigned DNA
catacagaccatgcagtcag

SEQ ID NO: 1047 - DNA, 20 bp, Felis catus
  source 1..20: mol_type = unassigned DNA
catgtgctcattgagagcat

SEQ ID NO: 1048 - DNA, 20 bp, Felis catus
  source 1..20: mol_type = unassigned DNA
cattagttgtgcacacaata

SEQ ID NO: 1049 - DNA, 20 bp, Felis catus
  source 1..20: mol_type = unassigned DNA
ccaggcatttacttccttaa

SEQ ID NO: 1050 - DNA, 20 bp, Felis catus
  source 1..20: mol_type = unassigned DNA
cccgtgtctgtgttctgtgc

SEQ ID NO: 1051 - DNA, 20 bp, Felis catus
  source 1..20: mol_type = unassigned DNA
ccctcctggcacaggtgcgt

SEQ ID NO: 1052 - DNA, 20 bp, Felis catus
  source 1..20: mol_type = unassigned DNA
ccttaaatgtcatcctggca

SEQ ID NO: 1053 - DNA, 20 bp, Felis catus
  source 1..20: mol_type = unassigned DNA
cctttggagcttctgggggg

SEQ ID NO: 1054 - DNA, 20 bp, Felis catus
  source 1..20: mol_type = unassigned DNA
ctacgtgcagctgcacccca

SEQ ID NO: 1055 - DNA, 20 bp, Felis catus
  source 1..20: mol_type = unassigned DNA
ctagcagctgacacgatgag

SEQ ID NO: 1056 - DNA, 20 bp, Felis catus
  source 1..20: mol_type = unassigned DNA
ctctccagaaatcggtctgt

SEQ ID NO: 1057 - DNA, 20 bp, Felis catus
  source 1..20: mol_type = unassigned DNA
cttaaatgtcatcctggcag

SEQ ID NO: 1058 - DNA, 20 bp, Felis catus
  source 1..20: mol_type = unassigned DNA
cttaacagcccaagggttga

SEQ ID NO: 1059 - DNA, 20 bp, Felis catus
  source 1..20: mol_type = unassigned DNA
cttccttctgtatcaattca

SEQ ID NO: 1060 - DNA, 20 bp, Felis catus
  source 1..20: mol_type = unassigned DNA
cttgggagagtatcgcattt

SEQ ID NO: 1061 - DNA, 20 bp, Felis catus
  source 1..20: mol_type = unassigned DNA
ctttggagcttctggggggg

SEQ ID NO: 1062 - DNA, 20 bp, Felis catus
  source 1..20: mol_type = unassigned DNA
gaaggagtagcaggaaacag

SEQ ID NO: 1063 - DNA, 20 bp, Felis catus
  source 1..20: mol_type = unassigned DNA
gacagatgagtctcaggtga

SEQ ID NO: 1064 - DNA, 20 bp, Felis catus
  source 1..20: mol_type = unassigned DNA
gagagagagtgcacacaagt

SEQ ID NO: 1065 - DNA, 20 bp, Felis catus
  source 1..20: mol_type = unassigned DNA
gaggcatgaggtgatcctgg

SEQ ID NO: 1066 - DNA, 20 bp, Felis catus
  source 1..20: mol_type = unassigned DNA
gaggcctggcaggagatcct

SEQ ID NO: 1067 - DNA, 20 bp, Felis catus
  source 1..20: mol_type = unassigned DNA
gatctcaagctgaacacttt

SEQ ID NO: 1068 - DNA, 20 bp, Felis catus
  source 1..20: mol_type = unassigned DNA
gatgggtgagagcagatgga

SEQ ID NO: 1069 - DNA, 20 bp, Felis catus
  source 1..20: mol_type = unassigned DNA
gatttttatctctttgtctt

SEQ ID NO: 1070 - DNA, 20 bp, Felis catus
  source 1..20: mol_type = unassigned DNA
gcacaggtgcgtgggtgacg

SEQ ID NO: 1071 - DNA, 20 bp, Felis catus
  source 1..20: mol_type = unassigned DNA
gccatcaacgaatattgcat

SEQ ID NO: 1072 - DNA, 20 bp, Felis catus
  source 1..20: mol_type = unassigned DNA
gcctttggagcttctggggg

SEQ ID NO: 1073 - DNA, 20 bp, Felis catus
  source 1..20: mol_type = unassigned DNA
gcttctgggggggggggtgt

SEQ ID NO: 1074 - DNA, 20 bp, Felis catus
  source 1..20: mol_type = unassigned DNA
ggaaggagtagcaggaaaca

SEQ ID NO: 1075 - DNA, 20 bp, Felis catus
  source 1..20: mol_type = unassigned DNA
ggaagggactccctggcttt

SEQ ID NO: 1076 - DNA, 20 bp, Felis catus
  source 1..20: mol_type = unassigned DNA
ggaatttcttgcatgactac

SEQ ID NO: 1077 - DNA, 20 bp, Felis catus
  source 1..20: mol_type = unassigned DNA
ggagaacggactcttatcca

SEQ ID NO: 1078 - DNA, 20 bp, Felis catus
  source 1..20: mol_type = unassigned DNA
ggcacaggtgcgtgggtgac

SEQ ID NO: 1079 - DNA, 20 bp, Felis catus
  source 1..20: mol_type = unassigned DNA
ggcctttggagcttctgggg

SEQ ID NO: 1080 - DNA, 20 bp, Felis catus
  source 1..20: mol_type = unassigned DNA
gggacggagcggaatcactg

SEQ ID NO: 1081 - DNA, 20 bp, Felis catus
  source 1..20: mol_type = unassigned DNA
gggagaggtttggagatgga

SEQ ID NO: 1082 - DNA, 20 bp, Felis catus
  source 1..20: mol_type = unassigned DNA
ggtgcgtgggtgacgggggg

SEQ ID NO: 1083 - DNA, 20 bp, Felis catus
  source 1..20: mol_type = unassigned DNA
gtcagtgcagagcctgacac

SEQ ID NO: 1084 - DNA, 20 bp, Felis catus
  source 1..20: mol_type = unassigned DNA
gtcctgagactcccctagta

SEQ ID NO: 1085 - DNA, 20 bp, Felis catus
  source 1..20: mol_type = unassigned DNA
gtgagttgctctcaagtggc

SEQ ID NO: 1086 - DNA, 20 bp, Felis catus
  source 1..20: mol_type = unassigned DNA
gtgcccggaggcaccggtca

SEQ ID NO: 1087 - DNA, 20 bp, Felis catus
  source 1..20: mol_type = unassigned DNA
gtgcgtgggtgacggggggg

SEQ ID NO: 1088 - DNA, 20 bp, Felis catus
  source 1..20: mol_type = unassigned DNA
gtgttcaagaggcttgaggt

SEQ ID NO: 1089 - DNA, 20 bp, Felis catus
  source 1..20: mol_type = unassigned DNA
gtgttctgtgcgggaagcgt

SEQ ID NO: 1090 - DNA, 20 bp, Felis catus
  source 1..20: mol_type = unassigned DNA
gtttttagtcgtagaatgga

SEQ ID NO: 1091 - DNA, 20 bp, Felis catus
  source 1..20: mol_type = unassigned DNA
tacatttaattgtatacttt

SEQ ID NO: 1092 - DNA, 20 bp, Felis catus
  source 1..20: mol_type = unassigned DNA
tacgcacagttggaaaatag

SEQ ID NO: 1093 - DNA, 20 bp, Felis catus
  source 1..20: mol_type = unassigned DNA
tacgggcacccagggcacat

SEQ ID NO: 1094 - DNA, 20 bp, Felis catus
  source 1..20: mol_type = unassigned DNA
tagcagctgacacgatgagg

SEQ ID NO: 1095 - DNA, 20 bp, Felis catus
  source 1..20: mol_type = unassigned DNA
tatctccaggacttaaactt

SEQ ID NO: 1096 - DNA, 20 bp, Felis catus
  source 1..20: mol_type = unassigned DNA
tattctctcatctgcaaaat

SEQ ID NO: 1097 - DNA, 20 bp, Felis catus
  source 1..20: mol_type = unassigned DNA
tcagactctcttcccaggaa

SEQ ID NO: 1098 - DNA, 20 bp, Felis catus
  source 1..20: mol_type = unassigned DNA
tcagttccactgctgttctt

SEQ ID NO: 1099 - DNA, 20 bp, Felis catus
  source 1..20: mol_type = unassigned DNA
tcatcctggcaggggcgcct

SEQ ID NO: 1100 - DNA, 20 bp, Felis catus
  source 1..20: mol_type = unassigned DNA
tcccactcttaacagcccaa

SEQ ID NO: 1101 - DNA, 20 bp, Felis catus
  source 1..20: mol_type = unassigned DNA
tctagcagctgacacgatga

SEQ ID NO: 1102 - DNA, 20 bp, Felis catus
  source 1..20: mol_type = unassigned DNA
tctgggatgtaagcagtcct

SEQ ID NO: 1103 - DNA, 20 bp, Felis catus
  source 1..20: mol_type = unassigned DNA
tgagcggtttcctcttcctt

SEQ ID NO: 1104 - DNA, 20 bp, Felis catus
  source 1..20: mol_type = unassigned DNA
tgaggcatgaggtgatcctg

SEQ ID NO: 1105 - DNA, 20 bp, Felis catus
  source 1..20: mol_type = unassigned DNA
tgatggaggagggtgagaca

SEQ ID NO: 1106 - DNA, 20 bp, Felis catus
  source 1..20: mol_type = unassigned DNA
tgcatgactacgggcaccca

SEQ ID NO: 1107 - DNA, 20 bp, Felis catus
  source 1..20: mol_type = unassigned DNA
tgcccggaggcaccggtcag

SEQ ID NO: 1108 - DNA, 20 bp, Felis catus
  source 1..20: mol_type = unassigned DNA
tgggaaccaggatagtttga

SEQ ID NO: 1109 - DNA, 20 bp, Felis catus
  source 1..20: mol_type = unassigned DNA
tgggctagaggttcttgcta

SEQ ID NO: 1110 - DNA, 20 bp, Felis catus
  source 1..20: mol_type = unassigned DNA
tgggggggggggtgtgggct

SEQ ID NO: 1111 - DNA, 20 bp, Felis catus
  source 1..20: mol_type = unassigned DNA
ttaagtttactgatggagga

SEQ ID NO: 1112 - DNA, 20 bp, Felis catus
  source 1..20: mol_type = unassigned DNA
ttacgcacagttggaaaata

SEQ ID NO: 1113 - DNA, 20 bp, Felis catus
  source 1..20: mol_type = unassigned DNA
ttacttccttaagggtgaga

SEQ ID NO: 1114 - DNA, 20 bp, Felis catus
  source 1..20: mol_type = unassigned DNA
ttgctggtgacccaagagct

SEQ ID NO: 1115 - DNA, 20 bp, Felis catus
  source 1..20: mol_type = unassigned DNA
ttgtttcagatttggccact

SEQ ID NO: 1116 - DNA, 20 bp, Felis catus
  source 1..20: mol_type = unassigned DNA
tttggagcttctgggggggg

SEQ ID NO: 1117 - DNA, 20 bp, Felis catus
  source 1..20: mol_type = unassigned DNA
tttgtcctcaagagtaggaa

SEQ ID NO: 1118 - DNA, 20 bp, Felis catus
  source 1..20: mol_type = unassigned DNA
tttttttctttctaggttcg

SEQ ID NO: 1119 - DNA, 20 bp, Felis catus
  source 1..20: mol_type = unassigned DNA
aaaaatccaggattgctacg

SEQ ID NO: 1120 - DNA, 20 bp, Felis catus
  source 1..20: mol_type = unassigned DNA
aaaggccgaaacaggcaggc

SEQ ID NO: 1121 - DNA, 20 bp, Felis catus
  source 1..20: mol_type = unassigned DNA
aaatcctctccgtgtctcag

SEQ ID NO: 1122 - DNA, 20 bp, Felis catus
  source 1..20: mol_type = unassigned DNA
acagagcagttggctcagca

SEQ ID NO: 1123 - DNA, 20 bp, Felis catus
  source 1..20: mol_type = unassigned DNA
acaggggtgacagttggagc

SEQ ID NO: 1124 - DNA, 20 bp, Felis catus
  source 1..20: mol_type = unassigned DNA
acatgtgctcattgagagca

SEQ ID NO: 1125 - DNA, 20 bp, Felis catus
  source 1..20: mol_type = unassigned DNA
acgtagcatatttccaactc

SEQ ID NO: 1126 - DNA, 20 bp, Felis catus
  source 1..20: mol_type = unassigned DNA
actgcttgtgctggcattgc

SEQ ID NO: 1127 - DNA, 20 bp, Felis catus
  source 1..20: mol_type = unassigned DNA
agagagagagtgcacacaag

SEQ ID NO: 1128 - DNA, 20 bp, Felis catus
  source 1..20: mol_type = unassigned DNA
agatctcaagctgaacactt

SEQ ID NO: 1129 - DNA, 20 bp, Felis catus
  source 1..20: mol_type = unassigned DNA
agccatcaacgaatattgca

SEQ ID NO: 1130 - DNA, 20 bp, Felis catus
  source 1..20: mol_type = unassigned DNA
agctgggacaacagagcagt

SEQ ID NO: 1131 - DNA, 20 bp, Felis catus
  source 1..20: mol_type = unassigned DNA
agcttctgggggggggggtg

SEQ ID NO: 1132 - DNA, 20 bp, Felis catus
  source 1..20: mol_type = unassigned DNA
aggaagggactccctggctt

SEQ ID NO: 1133 - DNA, 20 bp, Felis catus
  source 1..20: mol_type = unassigned DNA
aggagccttgtcagttctgg

SEQ ID NO: 1134 - DNA, 20 bp, Felis catus
  source 1..20: mol_type = unassigned DNA
agggctggtcagtgtatttc

SEQ ID NO: 1135 - DNA, 20 bp, Felis catus
  source 1..20: mol_type = unassigned DNA
agtgatttgtagcccaagga

SEQ ID NO: 1136 - DNA, 20 bp, Felis catus
  source 1..20: mol_type = unassigned DNA
atacatttaattgtatactt

SEQ ID NO: 1137 - DNA, 20 bp, Felis catus
  source 1..20: mol_type = unassigned DNA
ataggggactaatatcggtg

SEQ ID NO: 1138 - DNA, 20 bp, Felis catus
  source 1..20: mol_type = unassigned DNA
atatgtgagttgctctcaag

SEQ ID NO: 1139 - DNA, 20 bp, Felis catus
  source 1..20: mol_type = unassigned DNA
atcatgacctgagccgaagt

SEQ ID NO: 1140 - DNA, 20 bp, Felis catus
  source 1..20: mol_type = unassigned DNA
atgagagctttgtgaagaag

SEQ ID NO: 1141 - DNA, 20 bp, Felis catus
  source 1..20: mol_type = unassigned DNA
atgaggtgatcctgggggaa

SEQ ID NO: 1142 - DNA, 20 bp, Felis catus
  source 1..20: mol_type = unassigned DNA
attgctggtgacccaagagc

SEQ ID NO: 1143 - DNA, 20 bp, Felis catus
  source 1..20: mol_type = unassigned DNA
attgtttcagatttggccac

SEQ ID NO: 1144 - DNA, 20 bp, Felis catus
  source 1..20: mol_type = unassigned DNA
caactattcactaatgtttc

SEQ ID NO: 1145 - DNA, 20 bp, Felis catus
  source 1..20: mol_type = unassigned DNA
caatggaaatgaattactgt

SEQ ID NO: 1146 - DNA, 20 bp, Felis catus
  source 1..20: mol_type = unassigned DNA
cacaataggggagagttagt

SEQ ID NO: 1147 - DNA, 20 bp, Felis catus
  source 1..20: mol_type = unassigned DNA
caggaaacaggggtgacagt

SEQ ID NO: 1148 - DNA, 20 bp, Felis catus
  source 1..20: mol_type = unassigned DNA
caggtgagggagacatcgca

SEQ ID NO: 1149 - DNA, 20 bp, Felis catus
  source 1..20: mol_type = unassigned DNA
catcacctccagttggtctt

SEQ ID NO: 1150 - DNA, 20 bp, Felis catus
  source 1..20: mol_type = unassigned DNA
ccaagagctgggcgtcaaga

SEQ ID NO: 1151 - DNA, 20 bp, Felis catus
  source 1..20: mol_type = unassigned DNA
ccacaaagttaagcggcagc

SEQ ID NO: 1152 - DNA, 20 bp, Felis catus
  source 1..20: mol_type = unassigned DNA
ccacaggcctttggagcttc

SEQ ID NO: 1153 - DNA, 20 bp, Felis catus
  source 1..20: mol_type = unassigned DNA
ccatgcagtcaggggctaca

SEQ ID NO: 1154 - DNA, 20 bp, Felis catus
  source 1..20: mol_type = unassigned DNA
cccaccattttctgcttctt

SEQ ID NO: 1155 - DNA, 20 bp, Felis catus
  source 1..20: mol_type = unassigned DNA
ccctggctttgggaagcttc

SEQ ID NO: 1156 - DNA, 20 bp, Felis catus
  source 1..20: mol_type = unassigned DNA
cctcttcttgcctccctcac

SEQ ID NO: 1157 - DNA, 20 bp, Felis catus
  source 1..20: mol_type = unassigned DNA
cgaattaccttacgcacagt

SEQ ID NO: 1158 - DNA, 20 bp, Felis catus
  source 1..20: mol_type = unassigned DNA
cggactcttatccagggtct

SEQ ID NO: 1159 - DNA, 20 bp, Felis catus
  source 1..20: mol_type = unassigned DNA
ctacgggcacccagggcaca

SEQ ID NO: 1160 - DNA, 20 bp, Felis catus
  source 1..20: mol_type = unassigned DNA
ctattctctcatctgcaaaa

SEQ ID NO: 1161 - DNA, 20 bp, Felis catus
  source 1..20: mol_type = unassigned DNA
ctcagttccactgctgttct

SEQ ID NO: 1162 - DNA, 20 bp, Felis catus
  source 1..20: mol_type = unassigned DNA
ctcatgcctgaatcctgctt

SEQ ID NO: 1163 - DNA, 20 bp, Felis catus
  source 1..20: mol_type = unassigned DNA
ctcattgagagcatggggac

SEQ ID NO: 1164 - DNA, 20 bp, Felis catus
  source 1..20: mol_type = unassigned DNA
ctcttatccagggtcttgga

SEQ ID NO: 1165 - DNA, 20 bp, Felis catus
  source 1..20: mol_type = unassigned DNA
ctgggggggggggtgtgggc

SEQ ID NO: 1166 - DNA, 20 bp, Felis catus
  source 1..20: mol_type = unassigned DNA
ctgttctttacacctaaagc

SEQ ID NO: 1167 - DNA, 20 bp, Felis catus
  source 1..20: mol_type = unassigned DNA
cttcccaggaagggactccc

SEQ ID NO: 1168 - DNA, 20 bp, Felis catus
  source 1..20: mol_type = unassigned DNA
cttgatggctgctattcctt

SEQ ID NO: 1169 - DNA, 20 bp, Felis catus
  source 1..20: mol_type = unassigned DNA
cttgggattaagtttactga

SEQ ID NO: 1170 - DNA, 20 bp, Felis catus
  source 1..20: mol_type = unassigned DNA
ctttggttgacctggcacct

SEQ ID NO: 1171 - DNA, 20 bp, Felis catus
  source 1..20: mol_type = unassigned DNA
gaaggtgagtcagaagaccc

SEQ ID NO: 1172 - DNA, 20 bp, Felis catus
  source 1..20: mol_type = unassigned DNA
gactcaggtgatgacctgag

SEQ ID NO: 1173 - DNA, 20 bp, Felis catus
  source 1..20: mol_type = unassigned DNA
gaggggggcactgcttgtgc

SEQ ID NO: 1174 - DNA, 20 bp, Felis catus
  source 1..20: mol_type = unassigned DNA
gatgaggcatgaggtgatcc

SEQ ID NO: 1175 - DNA, 20 bp, Felis catus
  source 1..20: mol_type = unassigned DNA
gatgtaagcagtcctgggag

SEQ ID NO: 1176 - DNA, 20 bp, Felis catus
  source 1..20: mol_type = unassigned DNA
gattttccactctgttgttc

SEQ ID NO: 1177 - DNA, 20 bp, Felis catus
  source 1..20: mol_type = unassigned DNA
gattttttgtctacctgtag

SEQ ID NO: 1178 - DNA, 20 bp, Felis catus
  source 1..20: mol_type = unassigned DNA
ggagagttagttgggggtag

SEQ ID NO: 1179 - DNA, 20 bp, Felis catus
  source 1..20: mol_type = unassigned DNA
ggaggcctggcaggagatcc

SEQ ID NO: 1180 - DNA, 20 bp, Felis catus
  source 1..20: mol_type = unassigned DNA
gggccaaacctggagctact

SEQ ID NO: 1181 - DNA, 20 bp, Felis catus
  source 1..20: mol_type = unassigned DNA
ggggggggccgtctccatcc

SEQ ID NO: 1182 - DNA, 20 bp, Felis catus
  source 1..20: mol_type = unassigned DNA
gggtgagacagggccaaacc

SEQ ID NO: 1183 - DNA, 20 bp, Felis catus
  source 1..20: mol_type = unassigned DNA
ggtccctgcccacaggcctt

SEQ ID NO: 1184 - DNA, 20 bp, Felis catus
  source 1..20: mol_type = unassigned DNA
ggtcttggatggactagtca

SEQ ID NO: 1185 - DNA, 20 bp, Felis catus
  source 1..20: mol_type = unassigned DNA
ggtgttcaagaggcttgagg

SEQ ID NO: 1186 - DNA, 20 bp, Felis catus
  source 1..20: mol_type = unassigned DNA
gtagaatggagggagaggtt

SEQ ID NO: 1187 - DNA, 20 bp, Felis catus
  source 1..20: mol_type = unassigned DNA
gtcatcctggcaggggcgcc

SEQ ID NO: 1188 - DNA, 20 bp, Felis catus
  source 1..20: mol_type = unassigned DNA
gtctgggatgtaagcagtcc

SEQ ID NO: 1189 - DNA, 20 bp, Felis catus
  source 1..20: mol_type = unassigned DNA
gtcttttttgcggtggccaa

SEQ ID NO: 1190 - DNA, 20 bp, Felis catus
  source 1..20: mol_type = unassigned DNA
gtgagcggtttcctcttcct

SEQ ID NO: 1191 - DNA, 20 bp, Felis catus
  source 1..20: mol_type = unassigned DNA
gtgcagctgcaccccagggc

SEQ ID NO: 1192 - DNA, 20 bp, Felis catus
  source 1..20: mol_type = unassigned DNA
gttaaaaaaaaatgtcaccc

SEQ ID NO: 1193 - DNA, 20 bp, Felis catus
  source 1..20: mol_type = unassigned DNA
gtttccttcaataattttca

SEQ ID NO: 1194 - DNA, 20 bp, Felis catus
  source 1..20: mol_type = unassigned DNA
tagaaaatgttccgtctgtc

SEQ ID NO: 1195 - DNA, 20 bp, Felis catus
  source 1..20: mol_type = unassigned DNA
tagggacggagcggaatcac

SEQ ID NO: 1196 - DNA, 20 bp, Felis catus
  source 1..20: mol_type = unassigned DNA
tagtaagtccaacctcctct

SEQ ID NO: 1197 - DNA, 20 bp, Felis catus
  source 1..20: mol_type = unassigned DNA
tagtcccttaaatgtcatcc

SEQ ID NO: 1198 - DNA, 20 bp, Felis catus
  source 1..20: mol_type = unassigned DNA
tattcactaatgtttctgga

SEQ ID NO: 1199 - DNA, 20 bp, Felis catus
  source 1..20: mol_type = unassigned DNA
tcaagatgggtgagagcaga

SEQ ID NO: 1200 - DNA, 20 bp, Felis catus
  source 1..20: mol_type = unassigned DNA
tccccttgtgcccaccttga

SEQ ID NO: 1201 - DNA, 20 bp, Felis catus
  source 1..20: mol_type = unassigned DNA
tccctcctggcacaggtgcg

SEQ ID NO: 1202 - DNA, 20 bp, Felis catus
  source 1..20: mol_type = unassigned DNA
tcctggcaggggcgcctggg

SEQ ID NO: 1203 - DNA, 20 bp, Felis catus
  source 1..20: mol_type = unassigned DNA
tctcactcctttacctccca

SEQ ID NO: 1204 - DNA, 20 bp, Felis catus
  source 1..20: mol_type = unassigned DNA
tctctccagaaatcggtctg

SEQ ID NO: 1205 - DNA, 20 bp, Felis catus
  source 1..20: mol_type = unassigned DNA
tcttgggagagtatcgcatt

SEQ ID NO: 1206 - DNA, 20 bp, Felis catus
  source 1..20: mol_type = unassigned DNA
tgacctggcaccttggtatg

SEQ ID NO: 1207 - DNA, 20 bp, Felis catus
  source 1..20: mol_type = unassigned DNA
tgagagcacttaagcacctt

SEQ ID NO: 1208 - DNA, 20 bp, Felis catus
  source 1..20: mol_type = unassigned DNA
tgatgtttttagtcgtagaa

SEQ ID NO: 1209 - DNA, 20 bp, Felis catus
  source 1..20: mol_type = unassigned DNA
tgatttttatctctttgtct

SEQ ID NO: 1210 - DNA, 20 bp, Felis catus
  source 1..20: mol_type = unassigned DNA
tgcgggaagcgtgggaggcc

SEQ ID NO: 1211 - DNA, 20 bp, Felis catus
  source 1..20: mol_type = unassigned DNA
tgctcaaattgtttcagatt

SEQ ID NO: 1212 - DNA, 20 bp, Felis catus
  source 1..20: mol_type = unassigned DNA
tggagggagaggtttggaga

SEQ ID NO: 1213 - DNA, 20 bp, Felis catus
  source 1..20: mol_type = unassigned DNA
tggcaggagatcctgggaca

SEQ ID NO: 1214 - DNA, 20 bp, Felis catus
  source 1..20: mol_type = unassigned DNA
tggttgttcagactccctcc

SEQ ID NO: 1215 - DNA, 20 bp, Felis catus
  source 1..20: mol_type = unassigned DNA
tgtaggagccttgtcagttc

SEQ ID NO: 1216 - DNA, 20 bp, Felis catus
  source 1..20: mol_type = unassigned DNA
tgtggagctccaactcacaa

SEQ ID NO: 1217 - DNA, 20 bp, Felis catus
  source 1..20: mol_type = unassigned DNA
tgtgttctgtgcgggaagcg

SEQ ID NO: 1218 - DNA, 20 bp, Felis catus
  source 1..20: mol_type = unassigned DNA
ttaagcacctttggttgacc

SEQ ID NO: 1219 - DNA, 20 bp, Felis catus
  source 1..20: mol_type = unassigned DNA
ttagacacatcacctccagt

SEQ ID NO: 1220 - DNA, 20 bp, Felis catus
  source 1..20: mol_type = unassigned DNA
ttatctccaggacttaaact

SEQ ID NO: 1221 - DNA, 20 bp, Felis catus
  source 1..20: mol_type = unassigned DNA
ttatgacgtcttttttgcgg

SEQ ID NO: 1222 - DNA, 20 bp, Felis catus
  source 1..20: mol_type = unassigned DNA
ttgcacagttaggtcgattt

SEQ ID NO: 1223 - DNA, 20 bp, Felis catus
  source 1..20: mol_type = unassigned DNA
ttgggcacaagtaaggtttt

SEQ ID NO: 1224 - DNA, 20 bp, Felis catus
  source 1..20: mol_type = unassigned DNA
tttaaacatttatatcagta

SEQ ID NO: 1225 - DNA, 20 bp, Felis catus
  source 1..20: mol_type = unassigned DNA
tttgggaagcttctggtttt

SEQ ID NO: 1226 - DNA, 4516 bp, Felis catus
  misc_difference 1994: note = modified_base - a, c, t, g, unknown or other
  misc_difference 1996: note = modified_base - a, c, t, g, unknown or other
  misc_difference 2927: note = modified_base - a, c, t, g, unknown or other
  misc_difference 2929: note = modified_base - a, c, t, g, unknown or other
  misc_difference 3615..3664: note = modified_base - a, c, t, g, unknown or other
  source 1..4516: mol_type = unassigned DNA
ggcaacagctcgtgcaaaggccctggcgtggtcaagaagcagaaaggagacccgtgagggaggagagaatggcaggagtagatgcagaaaagcagcaggtcttcggtggggcgctggttacgcagagcacacgacggtcccaggccacagaagcagtctggcttttcctcggattgtatctccagagagataatggtgtgaatactatgaacagtatagagaaactcaaaggaagaagccagttggggggaaatgatatttctgtgtctgcctgaggtgctattaaagtgaccaggtgaggggcgcctgggtggcgcagtcggttaagcgtccggcttcagccaggtcacgatctcgcggtccgtgagttcgagccccgcgtcaggctctgggctgatggctcggagcctggagcctgtttccgattctgtgtctccctctctctctgcccctcccctgctcatgctctgtctctctctgtcccaaaaataaataaacattgaaaaaaaaattttaaaaaaaaaaaaaaagaagaaaaaaaaaaataaagtgaccaggtgacaggactcggtcaagagacgactagaacctgggcaccagcatgtaggggagggttcagggctccagaatcagattcaggagactggctcaagggaggccactgagcaggtcaaggacacagattatgacgaaggcagggcaggagccaccagagaccggcctccttttggtacttgctagctgtgagtccactagctaagcactgggtttcctgaaaaatccgtaagttgagaccagaccatcttcaaggtcacatgtaatgacaggctgacattggccatcattcgggaggcctgacttgggagactctcttgcccctttccccagtcaacctagaaaatttcagttctgaaattactggtgtcagctgacacttggacagagccctcaagacggggaaggggagccaaggtagcgtcatctgttgactcggggacttaggatcctgcccacacatacatctcctccctccacagcccccaggcagttctgagaagcagcccagagaggcctggcggtgcctcctggaaaaggatgttagacgcagccctcccaccctgccctactgttgcagccacagcaggtataaaagggttccaggctggggagggagcacctgccactgcatcatgaagggggctcgtgttctcgtgcttctctgggctgccttgctcttgatctggggtggaagtaggtgtctgggacatgagtgtctggggacacagattctccaggggttctaacaccttcccagggcacttctgagcatggcgggaaggggaagggaagaatgtgtcctgatgaaggtctttcaaaagggagggtcagcttgtctttgtgttccagattgtgaaatttgcccagccgtgaagagggatgttgacctattcctgatgggaacccctgacaaatatgttgagcaagtggcacaatacaatgcacgacctgtagtattggcaaatgccagaaacctgaagaactgcgttgatgcaaaaatgacagaagaggataaggagaatgctctcagcgtgctggtgggtctagctctgtgtctgtgcctctgacgcctgtctggggggtctgctcagggcagtgcaggaggggggttgctcatgtttgttctccaccatggcccttccctgggaatctgggaggagaaagacgccatggctggggaagtagaggggatcatgtggggaagactcagcctacccctcaagctttggggctggcccaggctgctcaacgctgcttggccaccagcttgggggtctgcaggccctcctgtgtccctggcatcacttggcctcagtgtcaggccctcagctctggccttcctgactccagcctctccagcacgtgagactggatcttcaaactgtttgcactaggtgcttcctatctccaaacgtcagttcctttctcttagabandnsctgagcaattatgccatgaatcatatgcttgttaggaagagcctcctgggcagtggcaacagctcgtgcaaaggccctggcgtggtcaagaagcagaaaggagacccgtgagggaggagagaatggcaggagtagatgcagaaaagcagcaggtcttcggtggggcgctggttacgcagagcacacgacggtcccaggccacagaagcagtctggcttttcctcggattgtatctccagagagataatggtgtgaatactatgaacagtatagagaaactcaaaggaagaagccagttggggggaaatgatattcctgtgtctgcctgaggtgctattaaagtgaccaggtgacaggactcggtcaagagacgactagaacctgggcaccagcatgtaggggagggctcagggctccagaatcagattcaggagactggctcaagggaggccactgagcaggtcaaggacacagattatgacgaaggcagggcaggagccaccagagaccggcctccttttggtacttgctagctgtgagtccactagctaagcactgggtttcctgaaaaatccgtaagttgagaccagaccatcttcaaggtcacatgtaatgacaggctgacattggccatcattcgggaggcctgacttgggagactctcttgcccctttccccagtcaacctagaaaatttcagttctgaaattactggtgtcagctgacacttggacagagccctcaagacggggaaggggagccaaggtagcgtcatctgttgactcggggacttaggatcctgcccacacatacatctcctccctccacagcccccaggcagttctgagaagcagcccagagaggcctggcggtgcctcctggaaaaggatgttagacgcagccctcccaccctgccctactgttgcgabandnsaagaggataaggagaatgctctcagcgtgctggtgggtctagctctgtgtctgtgcctctgacgcctgtctggggggtctgctcagggcagtgcaggaggggggttgctcatgtttgttctccaccatggcccttccctgggaatctgggaggagaaagacgccatggctggggaagtagaggggatcatgtggggaagactcagcctacccctcaagctttggggctggcccaggctgctcaacgctgcttggccaccggcttgggggtctgcaggccctcctgtgtccctggcatcacttggcctcagtgtcaggccctcagctctggccttcctgactccagcctctccagcacgtgagactggatcttcaaactgtttgcactaggtgcttcctatctccaaacgtcagttccttttctcttaactcctcaagttccatattccaccccccccccaaaaaaaaaccctcatttgtcttcattccctgggtcccagagggccattctgtgcctcaaatactgagagagaggaggaggggaggggagaagaggggcggggcagggagggacgaggggaggtgagatggggcagcttccaaaagccctccccctgccctgccattctgtgcctcacataccaagagagaggatgatggaaggggaggggaggggaggggagggnnnnnnnnnnnnnnnnnnnnnnnnnnnnnnnnnnnnnnnnnnnnnnnnnngcttccatccccaccacctgagcactcccccagaaaagagtctgctgaacttacactgcagggcttcccccaggaggggtatctctgtgatcattttggtgaagaggctgaggaaaggttcccagaggggatctctctctctctctctctctctctctctctctctctctgtggagcacgtcatggggacaggagaggaaggccaccttgcccagagtgagacctggctcttggcctatggcccaccactctgacccccagggtctggccggaggctacttctgaaatggagcactgcccccatggtagcaaggggagtccagaggtcataagcaggttgtggggcagagacccttctcatcaccctcccatatgtgacccagggtgtatattccaccactcccccaccatacatactgaaaagttcttgggcttacagaaggaaagctgtcacccagatgagtgggccaggtcttccaatgtcatagatgaagactcaccctggtccacagcaagtgtagggagtgaggggcaccccacccaaaggtgagaaggtgatgagcaacgggcagtttgtcctcaccaagacacaaccagccccccaactgctgctagactcgcacagaactccctggggactgatggcacctatgacatctggacgctttctgtgtaatccctcccctctggctgccttccaaacagccagatggctgtctgacatccaaacctcagatagcttgaaaggtaaatatcaggaacctaagggtgacgcttttgatctctgattcacacatgagatcataaaagccccgccccacttccccgtggtctgacctaaattcgcccaaa

SEQ ID NO: 1227 - DNA, 4416 bp, Felis catus
  source 1..4416: mol_type = unassigned DNA
tggttccgctggcagaacccaagaacagcagtggaactgagagttcctgcagaaaggttggcctcctcagaagacatctaccaaagaagcagaaaatggtggggcgcctgggtggctcagtcggttaaagtgtccaacttcggctcaggtcatgatctcacagtttgtgggtctgagacccgtgtcaggctctgcactgacagctcagaacctggagcctgctttggattctctctctctctctctctctctctctctgcccttcccacttgtgtgcactctctctctctttctctcaaaataaaacaattaagaaattttttaaaaacgtaaagacagaaaataggcaaataccactgagacacggagaggatttgtgataaacccactcaggtcatcacctgagtcacccttaaattgccagggtgacatttttttttaacgtttatttttaagagagagggtgagcgcttgcacacgtgcaagtgggggaggggcagagagagggagacacagactccaaagcaggattcaggcatgagctgtcagcacagggcctgatgccccgctcgaactcacaaaccttgagatcatgacctgagctgaagtcagtcacctaaccgactgagccacccaggcgcccctgccaggatgacatttaagggactagaggctctgctgctgtgacaaatgccagagttggaaatatgctacgtggacaacatttttatccttctgtggtgatgaatcctggggttacatgtatgtgatttaatttaatcctcacacttaatccccattttgcagatgagagaatagcccaaggaagaggaaaccgctcacatgtgctcctgattcagcctgcctccagtccccatgctctcaatgagcacatgtcacctccctttgccatgtcccaggatctcctgccaggcctcccacgcttcccgcacagaacacagacacggggcacccgggggtgctaagatgcagttattttattctagtcagcctgattgagagtgaattaggtgaggacaggtgtctggattccagctttaggtgtaaagaacaggacaggaggatggggctcagaaggggcatcagcggcaaagattcatctccccaaagtgttcagcttgagatcttctacggtgttctgaactgcttcacccatgcaatattcgttgatggctatctgggagagagtaagacgaggagggacagaagacctgagcgcatggcagcgctatccattcccccaggatcacctcatgcctcatccccagtgattccgctccgtccctagcaagaacctctagcccacagaccgatttctggagagagggccgcgatcagtcagaccaggatggagacggccccccccccgtcacccacgcacctgtgccaggagggagtctgaacaaccagtgagggaggcaagaagaggagaagattctggagggcgcgatgggggctgggcctgggtgaggggcaaggtagctgagtctgggtccatgcgatgtctccctcacctgagactcatctgtcaggtgtactggatgtatggaatgtgtatgtgtgtgttgtgaacaatcccatgtgccctgggtgcccgtagtcatgcaagaaattccacttcttcacaaagctctcattttacagaatcagcacttaacggcaagtagaggtaagagacagactaaccaaaatcgacctaactgtgcaacaagaaaaataacagaaaaagatagttcaccagaaatacactgaccagccctggggtgcagctgcacgtagctaggagctgcctcgagggcctcaggcaccagaacaacagagtggaaaatctgactttagaccctgaattgatacagaaggaagtgagactctgaaccaaaggaatagcagccatcaaggtgggcacaaggggaagtaaaacagaagccaaaaaccagaagcttcccaaagccagggagtcccttcctgggaagagagtctgagggcaggtgccttagtttcaatattcctccaccagaactgacaaggctcctacatgtgcaggagctgaatgaagaactttctctttcctgtggaaggctaaaatcctactcctgcaattctgacaccccgaacctagaaagaaaaaaatcctacgagtcaacacgctttctatgccacaccgatattagtcccctattttccaactgtgcgtaaggtaattcgcacacaagggacacgtgtggtagaagaacaggctgggtgtgcacatggcgtgaggttgcgtattctatgtgctgtagagcggagcaaaggtttatgtgctcgattgtttatagctcttacctgccatgtagcccctgactgcatggtctgtatgtggaatattacaatctgctgcacgcgcaacgtgaaggttggggaggcggggaaggaaaggaaattaccatgactagtccatccaagaccctggataagagtccgttctccacgtagcaatcctggatttttttcatggctgttctctctggttcagtagcattgacttttgtgagggacaagtccaacagtaattcatttccattggccaccgcaaaaaagacgtcataaaaaatggggcaagtttccgctgaagacacaaacagaaaacaccttcacaaaagaatcagcagagcaggaggttcctgtttgcccgccacttgagagcaactcacatatatccagggtcttctgactcaccttccgcagagacctgcccactcccaggactgcttacatcccagacagacggaacattttctatgaggcactctcagcagaagagagcagccggagagacccctgaccggtgcctccgggcaccccagcctgcctgtttcggcctttcaaataagcaccactacccccaactaactctcccctattgtgtgcacaactaatgatccctccatctccaaacctctccctccattctacgactaaaaacatcaggggggttctgcaggactcctggacaatgatctcccagctgccgcttaactttgtggctagaacctgtttggagatcaccatgggaggtaaaggagtgagatagagcagggcaaggatcaggaaggtcctctgtccctccatctgctctcacccatcttgacgcccagctcttgggtcaccagcaatgccagcacaagcagtgcccccctcatcgtgtcagctgctagaatgctctgctcaggacaggatttctgctgctttataaactactagcaccttaagcccagcccacacccccccccccagaagctccaaaggcctgtgggcagggacctggcacatgtgggtggctccctcaacccttgggctgttaagagtgggaagcccttcctactcttgaggacaaagctcttggagaggatgtggttttttctttgccaaagaccaactggaggtgatgtgtctaagtgattccatgctgagccaactgctctgttgtcccagctccaactgtcacccctgtttcctgctactccttccctcaaactatcctggttcccaaatgcgatactctcccaagacaaagagataaaaatcacaggaggggtcaaggacagatctacaccactacaggtagacaaaaaatcatccaaaaaccttacttgtgcccaagtttaagtcctggagataagtatggggtgctagacccacctcaagcctcttgaacaccttaactgctgcagtctgtggatcaagccctgagaatgggtggacaccatccttgggctacaaatcactccctactaggggagtctcaggacgcttgggcatgtaggcctcctcaagggctggtaacgctctaaattaggatcatgtcacctgcttccctctcacccttaaggaagtaaatgcctgggcaccttcttgactccaagtagctccaggtttggccctgtctcaccctcctccatcagtaaacttaatcccaagaggaggttggacttactagcccatccagaaacattagtgaatagttgtggggttgtacagtttgtctcttatgtccattgtgagttggagctccacataccaaggtgccaggtcaaccaaaggtgcttaagtgctctcaagagctaaactcaaccttctaatctaggaaagtagtttattggcacaaacatgacgagatagtccatgaaaattattgaaggaaactcccagtggccaaatctgaaacaatttgagcaaacaaaagaaataacattgtattggttgataacccaaagtatacaattaaatgtatgagtccatactgatataaatgtttaaataaataaataaggagataagagacagatattctttacaaaagcattctagataatacacataggtactctcccttaaggaggtggagcttattgc

SEQ ID NO: 1228 - DNA, 88 bp, synthetic construct
  misc_feature 1..88: note = Description of Artificial Sequence: Synthetic oligonucleotide
  source 1..88: mol_type = other DNA
gttggaaccattcaaaacagcatagcaagttaaaataaggctagtccgttatcaacttgaaaaagtggcaccgagtcggtgctttttt

SEQ ID NO: 1229 - DNA, 87 bp, synthetic construct
  misc_feature 1..87: note = Description of Artificial Sequence: Synthetic oligonucleotide
  source 1..87: mol_type = other DNA
ttggaaccattcaaaacagcatagcaagttaaaataaggctagtccgttatcaacttgaaaaagtggcaccgagtcggtgctttttt

SEQ ID NO: 1230 - DNA, 87 bp, synthetic construct
  misc_feature 1..87: note = Description of Artificial Sequence: Synthetic oligonucleotide
  source 1..87: mol_type = other DNA
gttggaaccattcaaaacagcatagcaagttaaaataaggctagtccgttatcaacttgaaaaagtggcaccgagtcggtgcttttt

SEQ ID NO: 1231 - DNA, 67 bp, synthetic construct
  misc_feature 1..67: note = Description of Artificial Sequence: Synthetic oligonucleotide
  source 1..67: mol_type = other DNA
atagcaagttaaaataaggctagtccgttatcaacttgaaaaagtggcaccgagtcggtgctttttt

SEQ ID NO: 1232 - DNA, 65 bp, synthetic construct
  misc_feature 1..65: note = Description of Artificial Sequence: Synthetic oligonucleotide
  source 1..65: mol_type = other DNA
tagcaagttaaaataaggctagtccgttatcaacttgaaaaagtggcaccgagtcggtgcttttt

SEQ ID NO: 1233 - DNA, 65 bp, synthetic construct
  misc_feature 1..65: note = Description of Artificial Sequence: Synthetic oligonucleotide
  source 1..65: mol_type = other DNA
atagcaagttaaaataaggctagtccgttatcaacttgaaaaagtggcaccgagtcggtgctttt

SEQ ID NO: 1234 - RNA, 20 nt, Felis catus
  source 1..20: mol_type = unassigned RNA
ggtgtctggattccagcttt

SEQ ID NO: 1235 - RNA, 20 nt, Felis catus
  source 1..20: mol_type = unassigned RNA
ctgttctttacacctaaagc

SEQ ID NO: 1236 - RNA, 20 nt, Felis catus
  source 1..20: mol_type = unassigned RNA
accttgcccagagtgagacc

SEQ ID NO: 1237 - RNA, 20 nt, Felis catus
  source 1..20: mol_type = unassigned RNA
ccaagagccaggtctcactc

SEQ ID NO: 1238 - RNA, 20 nt, Felis catus
  source 1..20: mol_type = unassigned RNA
gactagtccatccaagaccc

SEQ ID NO: 1239 - RNA, 20 nt, Felis catus
  source 1..20: mol_type = unassigned RNA
cggactcttatccagggtct

SEQ ID NO: 1240 - RNA, 20 nt, Felis catus
  source 1..20: mol_type = unassigned RNA
caatgcacgacctgtagtat

SEQ ID NO: 1241 - RNA, 20 nt, Felis catus
  source 1..20: mol_type = unassigned RNA
ctggcatttgccaatactac

SEQ ID NO: 1242 - RNA, 20 nt, Felis catus
  source 1..20: mol_type = unassigned RNA
aaaaaaaaaataaagtgacc

SEQ ID NO: 1243 - RNA, 20 nt, Felis catus
  source 1..20: mol_type = unassigned RNA
aaaaatgacagaagaggata

SEQ ID NO: 1244 - RNA, 20 nt, synthetic construct
  source 1..20: mol_type = other RNA
ggtgtctggattccagcttt

SEQ ID NO: 1245 - RNA, 20 nt, synthetic construct
  source 1..20: mol_type = other RNA
ctgttctttacacctaaagc

SEQ ID NO: 1246 - RNA, 20 nt, synthetic construct
  source 1..20: mol_type = other RNA
gactagtccatccaagaccc

SEQ ID NO: 1247 - RNA, 20 nt, synthetic construct
  source 1..20: mol_type = other RNA
cggactcttatccagggtct

SEQ ID NO: 1248 - RNA, 20 nt, synthetic construct
  source 1..20: mol_type = other RNA
accttgcccagagtgagacc

SEQ ID NO: 1249 - RNA, 20 nt, synthetic construct
  source 1..20: mol_type = other RNA
ccaagagccaggtctcactc

SEQ ID NO: 1250 - RNA, 20 nt, synthetic construct
  source 1..20: mol_type = other RNA
caatgcacgacctgtagtat

SEQ ID NO: 1251 - RNA, 20 nt, synthetic construct
  source 1..20: mol_type = other RNA
ctggcatttgccaatactac

SEQ ID NO: 1252 - RNA, 20 nt, synthetic construct
  source 1..20: mol_type = other RNA
aaaaaaaaaataaagtgacc

SEQ ID NO: 1253 - RNA, 20 nt, synthetic construct
  source 1..20: mol_type = other RNA
aaaaatgacagaagaggata

SEQ ID NO: 1254 - RNA, 20 nt, synthetic construct
  source 1..20: mol_type = other RNA
aaaagggttccaggctgggg

SEQ ID NO: 1255 - RNA, 20 nt, synthetic construct
  source 1..20: mol_type = other RNA
aaagttcttgggcttacaga

SEQ ID NO: 1256 - RNA, 20 nt, synthetic construct
  source 1..20: mol_type = other RNA
aaataaagtgaccaggtgac

SEQ ID NO: 1257 - RNA, 20 nt, synthetic construct
  source 1..20: mol_type = other RNA
aaatactgagagagaggagg

SEQ ID NO: 1258 - RNA, 20 nt, synthetic construct
  source 1..20: mol_type = other RNA
aaatttgcccagccgtgaag

SEQ ID NO: 1259 - RNA, 20 nt, synthetic construct
  source 1..20: mol_type = other RNA
aacagtatagagaaactcaa

SEQ ID NO: 1260 - RNA, 20 nt, synthetic construct
  source 1..20: mol_type = other RNA
aagacggggaaggggagcca

SEQ ID NO: 1261 - RNA, 20 nt, synthetic construct
  source 1..20: mol_type = other RNA
aagcagaaaggagacccgtg

SEQ ID NO: 1262 - RNA, 20 nt, synthetic construct
  source 1..20: mol_type = other RNA
aaggacacagattatgacga

SEQ ID NO: 1263 - RNA, 20 nt, synthetic construct
  source 1..20: mol_type = other RNA
acacagattatgacgaaggc

SEQ ID NO: 1264 - RNA, 20 nt, synthetic construct
  source 1..20: mol_type = other RNA
actgcagggcttcccccagg

SEQ ID NO: 1265 - RNA, 20 nt, synthetic construct
  source 1..20: mol_type = other RNA
agaaaggagacccgtgaggg

SEQ ID NO: 1266 - RNA, 20 nt, synthetic construct
  source 1..20: mol_type = other RNA
agaagaggggcggggcaggg

SEQ ID NO: 1267 - RNA, 20 nt, synthetic construct
  source 1..20: mol_type = other RNA
agagaggatgatggaagggg

SEQ ID NO: 1268 - RNA, 20 nt, synthetic construct
  source 1..20: mol_type = other RNA
agattcaggagactggctca

SEQ ID NO: 1269 - RNA, 20 nt, synthetic construct
  source 1..20: mol_type = other RNA
agcaggtataaaagggttcc

SEQ ID NO: 1270 - RNA, 20 nt, synthetic construct
  source 1..20: mol_type = other RNA
agggctccagaatcagattc

SEQ ID NO: 1271 - RNA, 20 nt, synthetic construct
  source 1..20: mol_type = other RNA
aggggttctaacaccttccc

SEQ ID NO: 1272 - RNA, 20 nt, synthetic construct
  source 1..20: mol_type = other RNA
aggtaaatatcaggaaccta

SEQ ID NO: 1273 - RNA, 20 nt, synthetic construct
  source 1..20: mol_type = other RNA
agtagatgcagaaaagcagc

SEQ ID NO: 1274 - RNA, 20 nt, synthetic construct
  source 1..20: mol_type = other RNA
agtggcaacagctcgtgcaa

SEQ ID NO: 1275 - RNA, 20 nt, synthetic construct
  source 1..20: mol_type = other RNA
atctgttgactcggggactt

SEQ ID NO: 1276 - RNA, 20 nt, synthetic construct
  source 1..20: mol_type = other RNA
atcttcaaactgtttgcact

SEQ ID NO: 1277 - RNA, 20 nt, synthetic construct
  source 1..20: mol_type = other RNA
atgaaggtctttcaaaaggg

SEQ ID NO: 1278 - RNA, 20 nt, synthetic construct
  source 1..20: mol_type = other RNA
atggaaggggaggggagggg

SEQ ID NO: 1279 - RNA, 20 nt, synthetic construct
  source 1..20: mol_type = other RNA
caaacctcagatagcttgaa

SEQ ID NO: 1280 - RNA, 20 nt, synthetic construct
  source 1..20: mol_type = other RNA
cacagcaagtgtagggagtg

SEQ ID NO: 1281 - RNA, 20 nt, synthetic construct
  source 1..20: mol_type = other RNA
caccccacccaaaggtgaga

SEQ ID NO: 1282 - RNA, 20 nt, synthetic construct
  source 1..20: mol_type = other RNA
caccctcccatatgtgaccc

SEQ ID NO: 1283 - RNA, 20 nt, synthetic construct
  source 1..20: mol_type = other RNA
cacctgccactgcatcatga

SEQ ID NO: 1284 - RNA, 20 nt, synthetic construct
  source 1..20: mol_type = other RNA
cacttctgagcatggcggga

SEQ ID NO: 1285 - RNA, 20 nt, synthetic construct
  source 1..20: mol_type = other RNA
cagagccctcaagacgggga

SEQ ID NO: 1286 - RNA, 20 nt, synthetic construct
  source 1..20: mol_type = other RNA
cagcatgtaggggagggctc

SEQ ID NO: 1287 - RNA, 20 nt, synthetic construct
  source 1..20: mol_type = other RNA
cagcatgtaggggagggttc

SEQ ID NO: 1288 - RNA, 20 nt, synthetic construct
  source 1..20: mol_type = other RNA
catcacttggcctcagtgtc

SEQ ID NO: 1289 - RNA, 20 nt, synthetic construct
  source 1..20: mol_type = other RNA
ccaagagagaggatgatgga

SEQ ID NO: 1290 - RNA, 20 nt, synthetic construct
  source 1..20: mol_type = other RNA
ccaccagcttgggggtctgc

SEQ ID NO: 1291 - RNA, 20 nt, synthetic construct
  source 1..20: mol_type = other RNA
ccaccggcttgggggtctgc

SEQ ID NO: 1292 - RNA, 20 nt, synthetic construct
  source 1..20: mol_type = other RNA
ccatgaatcatatgcttgtt

SEQ ID NO: 1293 - RNA, 20 nt, synthetic construct
  source 1..20: mol_type = other RNA
ccctggtccacagcaagtgt

SEQ ID NO: 1294 - RNA, 20 nt, synthetic construct
  source 1..20: mol_type = other RNA
cccttccctgggaatctggg

SEQ ID NO: 1295 - RNA, 20 nt, synthetic construct
  source 1..20: mol_type = other RNA
cctactgttgcagccacagc

SEQ ID NO: 1296 - RNA, 20 nt, synthetic construct
  source 1..20: mol_type = other RNA
cctgatgaaggtctttcaaa

SEQ ID NO: 1297 - RNA, 20 nt, synthetic construct
  source 1..20: mol_type = other RNA
cctgtctggggggtctgctc

SEQ ID NO: 1298 - RNA, 20 nt, synthetic construct
  source 1..20: mol_type = other RNA
cgccatggctggggaagtag

SEQ ID NO: 1299 - RNA, 20 nt, synthetic construct
  source 1..20: mol_type = other RNA
ctcaaatactgagagagagg

SEQ ID NO: 1300 - RNA, 20 nt, synthetic construct
  source 1..20: mol_type = other RNA
ctcaagggaggccactgagc

SEQ ID NO: 1301 - RNA, 20 nt, synthetic construct
  source 1..20: mol_type = other RNA
ctcctccctccacagccccc

SEQ ID NO: 1302 - RNA, 20 nt, synthetic construct
  source 1..20: mol_type = other RNA
ctgagagagaggaggagggg

SEQ ID NO: 1303 - RNA, 20 nt, synthetic construct
  source 1..20: mol_type = other RNA
ctggcggtgcctcctggaaa

SEQ ID NO: 1304 - RNA, 20 nt, synthetic construct
  source 1..20: mol_type = other RNA
ctgtgatcattttggtgaag

SEQ ID NO: 1305 - RNA, 20 nt, synthetic construct
  source 1..20: mol_type = other RNA
cttcattccctgggtcccag

SEQ ID NO: 1306 - RNA, 20 nt, synthetic construct
  source 1..20: mol_type = other RNA
gaacctgggcaccagcatgt

SEQ ID NO: 1307 - RNA, 20 nt, synthetic construct
  source 1..20: mol_type = other RNA
gacattggccatcattcggg

SEQ ID NO: 1308 - RNA, 20 nt, synthetic construct
  source 1..20: mol_type = other RNA
gacccccagggtctggccgg

SEQ ID NO: 1309 - RNA, 20 nt, synthetic construct
  source 1..20: mol_type = other RNA
gaggtgctattaaagtgacc

SEQ ID NO: 1310 - RNA, 20 nt, synthetic construct
  source 1..20: mol_type = other RNA
gatattcctgtgtctgcctg

SEQ ID NO: 1311 - RNA, 20 nt, synthetic construct
  source 1..20: mol_type = other RNA
gatatttctgtgtctgcctg

SEQ ID NO: 1312 - RNA, 20 nt, synthetic construct
  source 1..20: mol_type = other RNA
gattatgacgaaggcagggc

SEQ ID NO: 1313 - RNA, 20 nt, synthetic construct
  source 1..20: mol_type = other RNA
gcacgtcatggggacaggag

SEQ ID NO: 1314 - RNA, 20 nt, synthetic construct
  source 1..20: mol_type = other RNA
gcactgcccccatggtagca

SEQ ID NO: 1315 - RNA, 20 nt, synthetic construct
  source 1..20: mol_type = other RNA
gcagagcacacgacggtccc

SEQ ID NO: 1316 - RNA, 20 nt, synthetic construct
  source 1..20: mol_type = other RNA
gcagccacagcaggtataaa

SEQ ID NO: 1317 - RNA, 20 nt, synthetic construct
  source 1..20: mol_type = other RNA
gctattaaagtgaccaggtg

SEQ ID NO: 1318 - RNA, 20 nt, synthetic construct
  source 1..20: mol_type = other RNA
ggaagaatgtgtcctgatga

SEQ ID NO: 1319 - RNA, 20 nt, synthetic construct
  source 1..20: mol_type = other RNA
ggaggaggggaggggagaag

SEQ ID NO: 1320 - RNA, 20 nt, synthetic construct
  source 1..20: mol_type = other RNA
ggaggccactgagcaggtca

SEQ ID NO: 1321 - RNA, 20 nt, synthetic construct
  source 1..20: mol_type = other RNA
ggagtccagaggtcataagc

SEQ ID NO: 1322 - RNA, 20 nt, synthetic construct
  source 1..20: mol_type = other RNA
ggatgatggaaggggagggg

SEQ ID NO: 1323 - RNA, 20 nt, synthetic construct
  source 1..20: mol_type = other RNA
ggcccaccactctgaccccc

SEQ ID NO: 1324 - RNA, 20 nt, synthetic construct
  source 1..20: mol_type = other RNA
ggcgtggtcaagaagcagaa

SEQ ID NO: 1325 - RNA, 20 nt, synthetic construct
  source 1..20: mol_type = other RNA
ggctgaggaaaggttcccag

SEQ ID NO: 1326 - RNA, 20 nt, synthetic construct
  source 1..20: mol_type = other RNA
gggcagggagggacgagggg

SEQ ID NO: 1327 - RNA, 20 nt, synthetic construct
  source 1..20: mol_type = other RNA
gggcggggcagggagggacg

SEQ ID NO: 1328 - RNA, 20 nt, synthetic construct
  source 1..20: mol_type = other RNA
ggggagaagaggggcggggc

SEQ ID NO: 1329 - RNA, 20 nt, synthetic construct
  source 1..20: mol_type = other RNA
gggtctgctcagggcagtgc

SEQ ID NO: 1330 - RNA, 20 nt, synthetic construct
  source 1..20: mol_type = other RNA
gtcacccagatgagtgggcc

SEQ ID NO: 1331 - RNA, 20 nt, synthetic construct
  source 1..20: mol_type = other RNA
gtcatggggacaggagagga

SEQ ID NO: 1332 - RNA, 20 nt, synthetic construct
  source 1..20: mol_type = other RNA
gtctgctgaacttacactgc

SEQ ID NO: 1333 - RNA, 20 nt, synthetic construct
  source 1..20: mol_type = other RNA
gtgagggaggagagaatggc

SEQ ID NO: 1334 - RNA, 20 nt, synthetic construct
  source 1..20: mol_type = other RNA
gtgaggggcaccccacccaa

SEQ ID NO: 1335 - RNA, 20 nt, synthetic construct
  source 1..20: mol_type = other RNA
gtgagttcgagccccgcgtc

SEQ ID NO: 1336 - RNA, 20 nt, synthetic construct
  source 1..20: mol_type = other RNA
gtggagcacgtcatggggac

SEQ ID NO: 1337 - RNA, 20 nt, synthetic construct
  source 1..20: mol_type = other RNA
tacactgcagggcttccccc

SEQ ID NO: 1338 - RNA, 20 nt, synthetic construct
  source 1..20: mol_type = other RNA
tagcttgaaaggtaaatatc

SEQ ID NO: 1339 - RNA, 20 nt, synthetic construct
  source 1..20: mol_type = other RNA
tattaaagtgaccaggtgac

SEQ ID NO: 1340 - RNA, 20 nt, synthetic construct
  source 1..20: mol_type = other RNA
tcaagctttggggctggccc

SEQ ID NO: 1341 - RNA, 20 nt, synthetic construct
  source 1..20: mol_type = other RNA
tcaaggtcacatgtaatgac

SEQ ID NO: 1342 - RNA, 20 nt, synthetic construct
  source 1..20: mol_type = other RNA
tcaggagactggctcaaggg

SEQ ID NO: 1343 - RNA, 20 nt, synthetic construct
  source 1..20: mol_type = other RNA
tcattttggtgaagaggctg

SEQ ID NO: 1344 - RNA, 20 nt, synthetic construct
  source 1..20: mol_type = other RNA
tctgctcagggcagtgcagg

SEQ ID NO: 1345 - RNA, 20 nt, synthetic construct
  source 1..20: mol_type = other RNA
tctggggacacagattctcc

SEQ ID NO: 1346 - RNA, 20 nt, synthetic construct
  source 1..20: mol_type = other RNA
tcttgatctggggtggaagt

SEQ ID NO: 1347 - RNA, 20 nt, synthetic construct
  source 1..20: mol_type = other RNA
tgagcatggcgggaagggga

SEQ ID NO: 1348 - RNA, 20 nt, synthetic construct
  source 1..20: mol_type = other RNA
tgatgcaaaaatgacagaag

SEQ ID NO: 1349 - RNA, 20 nt, synthetic construct
  source 1..20: mol_type = other RNA
tgcctcaaatactgagagag

SEQ ID NO: 1350 - RNA, 20 nt, synthetic construct
  source 1..20: mol_type = other RNA
tgcctcacataccaagagag

SEQ ID NO: 1351 - RNA, 20 nt, synthetic construct
  source 1..20: mol_type = other RNA
tgggcaccagcatgtagggg

SEQ ID NO: 1352 - RNA, 20 nt, synthetic construct
  source 1..20: mol_type = other RNA
tggtagcaaggggagtccag

SEQ ID NO: 1353 - RNA, 20 nt, synthetic construct
  source 1..20: mol_type = other RNA
ttaagcgtccggcttcagcc

SEQ ID NO: 1354 - RNA, 20 nt, synthetic construct
  source 1..20: mol_type = other RNA
ttctgagaagcagcccagag

SEQ ID NO: 1355 - RNA, 20 nt, synthetic construct
  source 1..20: mol_type = other RNA
ttgagaccagaccatcttca

SEQ ID NO: 1356 - RNA, 20 nt, synthetic construct
  source 1..20: mol_type = other RNA
ttggtgaagaggctgaggaa

SEQ ID NO: 1357 - RNA, 20 nt, synthetic construct
  source 1..20: mol_type = other RNA
agcagcccagagaggcctgg

SEQ ID NO: 1358 - RNA, 20 nt, synthetic construct
  source 1..20: mol_type = other RNA
aggggaggggagaagagggg

SEQ ID NO: 1359 - RNA, 20 nt, synthetic construct
  source 1..20: mol_type = other RNA
agtgaccaggtgacaggact

SEQ ID NO: 1360 - RNA, 20 nt, synthetic construct
  source 1..20: mol_type = other RNA
caggctctgggctgatggct

SEQ ID NO: 1361 - RNA, 20 nt, synthetic construct
  source 1..20: mol_type = other RNA
cagggcacttctgagcatgg

SEQ ID NO: 1362 - RNA, 20 nt, synthetic construct
  source 1..20: mol_type = other RNA
cttggacagagccctcaaga

SEQ ID NO: 1363 - RNA, 20 nt, synthetic construct
  source 1..20: mol_type = other RNA
gaagcagtctggcttttcct

SEQ ID NO: 1364 - RNA, 20 nt, synthetic construct
  source 1..20: mol_type = other RNA
gcagaaaagcagcaggtctt

SEQ ID NO: 1365 - RNA, 20 nt, synthetic construct
  source 1..20: mol_type = other RNA
gctcaacgctgcttggccac

SEQ ID NO: 1366 - RNA, 20 nt, synthetic construct
  source 1..20: mol_type = other RNA
ggcgcagtcggttaagcgtc

SEQ ID NO: 1367 - RNA, 20 nt, synthetic construct
  source 1..20: mol_type = other RNA
ggctgacattggccatcatt

SEQ ID NO: 1368 - RNA, 20 nt, synthetic construct
  source 1..20: mol_type = other RNA
gggcaggagccaccagagac

SEQ ID NO: 1369 - RNA, 20 nt, synthetic construct
  source 1..20: mol_type = other RNA
gggcgcctgggtggcgcagt

SEQ ID NO: 1370 - RNA, 20 nt, synthetic construct
  source 1..20: mol_type = other RNA
ggtagcgtcatctgttgact

SEQ ID NO: 1371 - RNA, 20 nt, synthetic construct
  source 1..20: mol_type = other RNA
ggtgagaaggtgatgagcaa

SEQ ID NO: 1372 - RNA, 20 nt, synthetic construct
  source 1..20: mol_type = other RNA
tcagccaggtcacgatctcg

SEQ ID NO: 1373 - RNA, 20 nt, synthetic construct
  source 1..20: mol_type = other RNA
tctgacccccagggtctggc

SEQ ID NO: 1374 - RNA, 20 nt, synthetic construct
  source 1..20: mol_type = other RNA
tggttacgcagagcacacga

SEQ ID NO: 1375 - RNA, 20 nt, synthetic construct
  source 1..20: mol_type = other RNA
aaaagcagcaggtcttcggt

SEQ ID NO: 1376 - RNA, 20 nt, synthetic construct
  source 1..20: mol_type = other RNA
aaagcagcaggtcttcggtg

SEQ ID NO: 1377 - RNA, 20 nt, synthetic construct
  source 1..20: mol_type = other RNA
aaaggaagaagccagttggg

SEQ ID NO: 1378 - RNA, 20 nt, synthetic construct
  source 1..20: mol_type = other RNA
aaagggttccaggctgggga

SEQ ID NO: 1379 - RNA, 20 nt, synthetic construct
  source 1..20: mol_type = other RNA
aacctgggcaccagcatgta

SEQ ID NO: 1380 - RNA, 20 nt, synthetic construct
  source 1..20: mol_type = other RNA
aagagagaggatgatggaag

SEQ ID NO: 1381 - RNA, 20 nt, synthetic construct
  source 1..20: mol_type = other RNA
aagctgtcacccagatgagt

SEQ ID NO: 1382 - RNA, 20 nt, synthetic construct
  source 1..20: mol_type = other RNA
aatactgagagagaggagga

SEQ ID NO: 1383 - RNA, 20 nt, synthetic construct
  source 1..20: mol_type = other RNA
aatgctctcagcgtgctggt

SEQ ID NO: 1384 - RNA, 20 nt, synthetic construct
  source 1..20: mol_type = other RNA
aatttgcccagccgtgaaga

SEQ ID NO: 1385 - RNA, 20 nt, synthetic construct
  source 1..20: mol_type = other RNA
acagcaagtgtagggagtga

SEQ ID NO: 1386 - RNA, 20 nt, synthetic construct
  source 1..20: mol_type = other RNA
accctcccatatgtgaccca

SEQ ID NO: 1387 - RNA, 20 nt, synthetic construct
  source 1..20: mol_type = other RNA
acctgccactgcatcatgaa

SEQ ID NO: 1388 - RNA, 20 nt, synthetic construct
  source 1..20: mol_type = other RNA
acctgggcaccagcatgtag

SEQ ID NO: 1389 - RNA, 20 nt, synthetic construct
  source 1..20: mol_type = other RNA
actgcccccatggtagcaag

SEQ ID NO: 1390 - RNA, 20 nt, synthetic construct
  source 1..20: mol_type = other RNA
acttctgagcatggcgggaa

SEQ ID NO: 1391 - RNA, 20 nt, synthetic construct
  source 1..20: mol_type = other RNA
agactcgcacagaactccct

SEQ ID NO: 1392 - RNA, 20 nt, synthetic construct
  source 1..20: mol_type = other RNA
agagccctcaagacggggaa

SEQ ID NO: 1393 - RNA, 20 nt, synthetic construct
  source 1..20: mol_type = other RNA
agaggatgatggaaggggag

SEQ ID NO: 1394 - RNA, 20 nt, synthetic construct
  source 1..20: mol_type = other RNA
agaggtcataagcaggttgt

SEQ ID NO: 1395 - RNA, 20 nt, synthetic construct
  source 1..20: mol_type = other RNA
agcagaaaggagacccgtga

SEQ ID NO: 1396 - RNA, 20 nt, synthetic construct
  source 1..20: mol_type = other RNA
agcatgtaggggagggctca

SEQ ID NO: 1397 - RNA, 20 nt, synthetic construct
  source 1..20: mol_type = other RNA
agcatgtaggggagggttca

SEQ ID NO: 1398 - RNA, 20 nt, synthetic construct
  source 1..20: mol_type = other RNA
agcctacccctcaagctttg

SEQ ID NO: 1399 - RNA, 20 nt, synthetic construct
  source 1..20: mol_type = other RNA
aggagaaagacgccatggct

SEQ ID NO: 1400 - RNA, 20 nt, synthetic construct
  source 1..20: mol_type = other RNA
aggaggggaggggagaagag

SEQ ID NO: 1401 - RNA, 20 nt, synthetic construct
  source 1..20: mol_type = other RNA
agggcacttctgagcatggc

SEQ ID NO: 1402 - RNA, 20 nt, synthetic construct
  source 1..20: mol_type = other RNA
atacatactgaaaagttctt

SEQ ID NO: 1403 - RNA, 20 nt, synthetic construct
  source 1..20: mol_type = other RNA
atactgagagagaggaggag

SEQ ID NO: 1404 - RNA, 20 nt, synthetic construct
  source 1..20: mol_type = other RNA
atgatggaaggggaggggag

SEQ ID NO: 1405 - RNA, 20 nt, synthetic construct
  source 1..20: mol_type = other RNA
caaaggaagaagccagttgg

SEQ ID NO: 1406 - RNA, 20 nt, synthetic construct
  source 1..20: mol_type = other RNA
caagagagaggatgatggaa

SEQ ID NO: 1407 - RNA, 20 nt, synthetic construct
  source 1..20: mol_type = other RNA
cacagattatgacgaaggca

SEQ ID NO: 1408 - RNA, 20 nt, synthetic construct
  source 1..20: mol_type = other RNA
cactgcccccatggtagcaa

SEQ ID NO: 1409 - RNA, 20 nt, synthetic construct
  source 1..20: mol_type = other RNA
cagcaagtgtagggagtgag

SEQ ID NO: 1410 - RNA, 20 nt, synthetic construct
  source 1..20: mol_type = other RNA
cagccacagcaggtataaaa

SEQ ID NO: 1411 - RNA, 20 nt, synthetic construct
  source 1..20: mol_type = other RNA
cagcctacccctcaagcttt

SEQ ID NO: 1412 - RNA, 20 nt, synthetic construct
  source 1..20: mol_type = other RNA
ccatggctggggaagtagag

SEQ ID NO: 1413 - RNA, 20 nt, synthetic construct
  source 1..20: mol_type = other RNA
cctgccactgcatcatgaag

SEQ ID NO: 1414 - RNA, 20 nt, synthetic construct
  source 1..20: mol_type = other RNA
cctggtccacagcaagtgta

SEQ ID NO: 1415 - RNA, 20 nt, synthetic construct
  source 1..20: mol_type = other RNA
cgagccccgcgtcaggctct

SEQ ID NO: 1416 - RNA, 20 nt, synthetic construct
  source 1..20: mol_type = other RNA
cgctgcttggccaccagctt

SEQ ID NO: 1417 - RNA, 20 nt, synthetic construct
  source 1..20: mol_type = other RNA
cgctgcttggccaccggctt

SEQ ID NO: 1418 - RNA, 20 nt, synthetic construct
  source 1..20: mol_type = other RNA
ctattaaagtgaccaggtga

SEQ ID NO: 1419 - RNA, 20 nt, synthetic construct
  source 1..20: mol_type = other RNA
ctcaaaggaagaagccagtt

SEQ ID NO: 1420 - RNA, 20 nt, synthetic construct
  source 1..20: mol_type = other RNA
ctcagggcagtgcaggaggg

SEQ ID NO: 1421 - RNA, 20 nt, synthetic construct
  source 1..20: mol_type = other RNA
ctcatttgtcttcattccct

SEQ ID NO: 1422 - RNA, 20 nt, synthetic construct
  source 1..20: mol_type = other RNA
ctccaccatggcccttccct

SEQ ID NO: 1423 - RNA, 20 nt, synthetic construct
  source 1..20: mol_type = other RNA
ctctctgtggagcacgtcat

SEQ ID NO: 1424 - RNA, 20 nt, synthetic construct
  source 1..20: mol_type = other RNA
ctgaggaaaggttcccagag

SEQ ID NO: 1425 - RNA, 20 nt, synthetic construct
  source 1..20: mol_type = other RNA
ctgatgaaggtctttcaaaa

SEQ ID NO: 1426 - RNA, 20 nt, synthetic construct
  source 1..20: mol_type = other RNA
ctgcagggcttcccccagga

SEQ ID NO: 1427 - RNA, 20 nt, synthetic construct
  source 1..20: mol_type = other RNA
ctgccactgcatcatgaagg

SEQ ID NO: 1428 - RNA, 20 nt, synthetic construct
  source 1..20: mol_type = other RNA
ctgctcagggcagtgcagga

SEQ ID NO: 1429 - RNA, 20 nt, synthetic construct
  source 1..20: mol_type = other RNA
ctgcttggccaccagcttgg

SEQ ID NO: 1430 - RNA, 20 nt, synthetic construct
  source 1..20: mol_type = other RNA
ctgcttggccaccggcttgg

SEQ ID NO: 1431 - RNA, 20 nt, synthetic construct
  source 1..20: mol_type = other RNA
ctggggacacagattctcca

SEQ ID NO: 1432 - RNA, 20 nt, synthetic construct
  source 1..20: mol_type = other RNA
ctgtctggggggtctgctca

SEQ ID NO: 1433 - RNA, 20 nt, synthetic construct
  source 1..20: mol_type = other RNA
cttctgagcatggcgggaag

SEQ ID NO: 1434 - RNA, 20 nt, synthetic construct
  source 1..20: mol_type = other RNA
cttgttaggaagagcctcct

SEQ ID NO: 1435 - RNA, 20 nt, synthetic construct
  source 1..20: mol_type = other RNA
gaagaggggcggggcaggga

SEQ ID NO: 1436 - RNA, 20 nt, synthetic construct
  source 1..20: mol_type = other RNA
gaagtagaggggatcatgtg

SEQ ID NO: 1437 - RNA, 20 nt, synthetic construct
  source 1..20: mol_type = other RNA
gactcgcacagaactccctg

SEQ ID NO: 1438 - RNA, 20 nt, synthetic construct
  source 1..20: mol_type = other RNA
gagagagaggaggaggggag

SEQ ID NO: 1439 - RNA, 20 nt, synthetic construct
  source 1..20: mol_type = other RNA
gagaggatgatggaagggga

SEQ ID NO: 1440 - RNA, 20 nt, synthetic construct
  source 1..20: mol_type = other RNA
gagcatggcgggaaggggaa

SEQ ID NO: 1441 - RNA, 20 nt, synthetic construct
  source 1..20: mol_type = other RNA
gagccctcaagacggggaag

SEQ ID NO: 1442 - RNA, 20 nt, synthetic construct
  source 1..20: mol_type = other RNA
gaggaggggaggggagaaga

SEQ ID NO: 1443 - RNA, 20 nt, synthetic construct
  source 1..20: mol_type = other RNA
gaggtcataagcaggttgtg

SEQ ID NO: 1444 - RNA, 20 nt, synthetic construct
  source 1..20: mol_type = other RNA
gagtccactagctaagcact

SEQ ID NO: 1445 - RNA, 20 nt, synthetic construct
  source 1..20: mol_type = other RNA
gatgatggaaggggagggga

SEQ ID NO: 1446 - RNA, 20 nt, synthetic construct
  source 1..20: mol_type = other RNA
gatgttgacctattcctgat

SEQ ID NO: 1447 - RNA, 20 nt, synthetic construct
  source 1..20: mol_type = other RNA
gattcaggagactggctcaa

SEQ ID NO: 1448 - RNA, 20 nt, synthetic construct
  source 1..20: mol_type = other RNA
gccatggctggggaagtaga

SEQ ID NO: 1449 - RNA, 20 nt, synthetic construct
  source 1..20: mol_type = other RNA
gcccaccactctgaccccca

SEQ ID NO: 1450 - RNA, 20 nt, synthetic construct
  source 1..20: mol_type = other RNA
gcctctgacgcctgtctggg

SEQ ID NO: 1451 - RNA, 20 nt, synthetic construct
  source 1..20: mol_type = other RNA
gcggggcagggagggacgag

SEQ ID NO: 1452 - RNA, 20 nt, synthetic construct
  source 1..20: mol_type = other RNA
gctcagggcagtgcaggagg

SEQ ID NO: 1453 - RNA, 20 nt, synthetic construct
  source 1..20: mol_type = other RNA
gctgacattggccatcattc

SEQ ID NO: 1454 - RNA, 20 nt, synthetic construct
  source 1..20: mol_type = other RNA
gctgaggaaaggttcccaga

SEQ ID NO: 1455 - RNA, 20 nt, synthetic construct
  source 1..20: mol_type = other RNA
gctgccttgctcttgatctg

SEQ ID NO: 1456 - RNA, 20 nt, synthetic construct
  source 1..20: mol_type = other RNA
gctgcttggccaccagcttg

SEQ ID NO: 1457 - RNA, 20 nt, synthetic construct
  source 1..20: mol_type = other RNA
gctgcttggccaccggcttg

SEQ ID NO: 1458 - RNA, 20 nt, synthetic construct
  source 1..20: mol_type = other RNA
ggaaggggaggggaggggag

SEQ ID NO: 1459 - RNA, 20 nt, synthetic construct
  source 1..20: mol_type = other RNA
ggaagtagaggggatcatgt

SEQ ID NO: 1460 - RNA, 20 nt, synthetic construct
  source 1..20: mol_type = other RNA
ggacgaggggaggtgagatg

SEQ ID NO: 1461 - RNA, 20 nt, synthetic construct
  source 1..20: mol_type = other RNA
ggagaaagacgccatggctg

SEQ ID NO: 1462 - RNA, 20 nt, synthetic construct
  source 1..20: mol_type = other RNA
ggcggggcagggagggacga

SEQ ID NO: 1463 - RNA, 20 nt, synthetic construct
  source 1..20: mol_type = other RNA
ggctgccttgctcttgatct

SEQ ID NO: 1464 - RNA, 20 nt, synthetic construct
  source 1..20: mol_type = other RNA
gggacgaggggaggtgagat

SEQ ID NO: 1465 - RNA, 20 nt, synthetic construct
  source 1..20: mol_type = other RNA
gggagaagaggggcggggca

SEQ ID NO: 1466 - RNA, 20 nt, synthetic construct
  source 1..20: mol_type = other RNA
gggaggggagaagaggggcg

SEQ ID NO: 1467 - RNA, 20 nt, synthetic construct
  source 1..20: mol_type = other RNA
gggcaccagcatgtagggga

SEQ ID NO: 1468 - RNA, 20 nt, synthetic construct
  source 1..20: mol_type = other RNA
ggggaggggagaagaggggc

SEQ ID NO: 1469 - RNA, 20 nt, synthetic construct
  source 1..20: mol_type = other RNA
ggggttctaacaccttccca

SEQ ID NO: 1470 - RNA, 20 nt, synthetic construct
  source 1..20: mol_type = other RNA
ggtaaatatcaggaacctaa

SEQ ID NO: 1471 - RNA, 20 nt, synthetic construct
  source 1..20: mol_type = other RNA
gtagcgtcatctgttgactc

SEQ ID NO: 1472 - RNA, 20 nt, synthetic construct
  source 1..20: mol_type = other RNA
gtataaaagggttccaggct

SEQ ID NO: 1473 - RNA, 20 nt, synthetic construct
  source 1..20: mol_type = other RNA
gtctgggacatgagtgtctg

SEQ ID NO: 1474 - RNA, 20 nt, synthetic construct
  source 1..20: mol_type = other RNA
gtgagaaggtgatgagcaac

SEQ ID NO: 1475 - RNA, 20 nt, synthetic construct
  source 1..20: mol_type = other RNA
gtgcctctgacgcctgtctg

SEQ ID NO: 1476 - RNA, 20 nt, synthetic construct
  source 1..20: mol_type = other RNA
tagcgtcatctgttgactcg

SEQ ID NO: 1477 - RNA, 20 nt, synthetic construct
  source 1..20: mol_type = other RNA
tataaaagggttccaggctg

SEQ ID NO: 1478 - RNA, 20 nt, synthetic construct
  source 1..20: mol_type = other RNA
tattaaagtgaccaggtgag

SEQ ID NO: 1479 - RNA, 20 nt, synthetic construct
  source 1..20: mol_type = other RNA
tcaaaggaagaagccagttg

SEQ ID NO: 1480 - RNA, 20 nt, synthetic construct
  source 1..20: mol_type = other RNA
tcaagagacgactagaacct

SEQ ID NO: 1481 - RNA, 20 nt, synthetic construct
  source 1..20: mol_type = other RNA
tcattcgggaggcctgactt

SEQ ID NO: 1482 - RNA, 20 nt, synthetic construct
  source 1..20: mol_type = other RNA
tcgtgttctcgtgcttctct

SEQ ID NO: 1483 - RNA, 20 nt, synthetic construct
  source 1..20: mol_type = other RNA
tctctgtggagcacgtcatg

SEQ ID NO: 1484 - RNA, 20 nt, synthetic construct
  source 1..20: mol_type = other RNA
tctgctgaacttacactgca

SEQ ID NO: 1485 - RNA, 20 nt, synthetic construct
  source 1..20: mol_type = other RNA
tgaaggtctttcaaaaggga

SEQ ID NO: 1486 - RNA, 20 nt, synthetic construct
  source 1..20: mol_type = other RNA
tgaccaggtgaggggcgcct

SEQ ID NO: 1487 - RNA, 20 nt, synthetic construct
  source 1..20: mol_type = other RNA
tgagagagaggaggagggga

SEQ ID NO: 1488 - RNA, 20 nt, synthetic construct
  source 1..20: mol_type = other RNA
tgcagggcttcccccaggag

SEQ ID NO: 1489 - RNA, 20 nt, synthetic construct
  source 1..20: mol_type = other RNA
tgcctctgacgcctgtctgg

SEQ ID NO: 1490 - RNA, 20 nt, synthetic construct
  source 1..20: mol_type = other RNA
tgctcagggcagtgcaggag

SEQ ID NO: 1491 - RNA, 20 nt, synthetic construct
  source 1..20: mol_type = other RNA
tggaaggggaggggagggga

SEQ ID NO: 1492 - RNA, 20 nt, synthetic construct
  source 1..20: mol_type = other RNA
tggacagagccctcaagacg

SEQ ID NO: 1493 - RNA, 20 nt, synthetic construct
  source 1..20: mol_type = other RNA
tggcccttccctgggaatct

SEQ ID NO: 1494 - RNA, 20 nt, synthetic construct
  source 1..20: mol_type = other RNA
tggggacacagattctccag

SEQ ID NO: 1495 - RNA, 20 nt, synthetic construct
  source 1..20: mol_type = other RNA
tggggtggaagtaggtgtct

SEQ ID NO: 1496 - RNA, 20 nt, synthetic construct
  source 1..20: mol_type = other RNA
tgtctgggacatgagtgtct

SEQ ID NO: 1497 - RNA, 20 nt, synthetic construct
  source 1..20: mol_type = other RNA
tgtgcctctgacgcctgtct

SEQ ID NO: 1498 - RNA, 20 nt, synthetic construct
  source 1..20: mol_type = other RNA
ttcattccctgggtcccaga

SEQ ID NO: 1499 - RNA, 20 nt, synthetic construct
  source 1..20: mol_type = other RNA
ttggacagagccctcaagac

SEQ ID NO: 1500 - RNA, 20 nt, synthetic construct
  source 1..20: mol_type = other RNA
aaagctgtcacccagatgag

SEQ ID NO: 1501 - RNA, 20 nt, synthetic construct
  source 1..20: mol_type = other RNA
aacagctcgtgcaaaggccc

SEQ ID NO: 1502 - RNA, 20 nt, synthetic construct
  source 1..20: mol_type = other RNA
aatttcagttctgaaattac

SEQ ID NO: 1503 - RNA, 20 nt, synthetic construct
  source 1..20: mol_type = other RNA
accagagaccggcctccttt

SEQ ID NO: 1504 - RNA, 20 nt, synthetic construct
  source 1..20: mol_type = other RNA
acccgtgagggaggagagaa

SEQ ID NO: 1505 - RNA, 20 nt, synthetic construct
  source 1..20: mol_type = other RNA
acgctgcttggccaccagct

SEQ ID NO: 1506 - RNA, 20 nt, synthetic construct
  source 1..20: mol_type = other RNA
acgctgcttggccaccggct

SEQ ID NO: 1507 - RNA, 20 nt, synthetic construct
  source 1..20: mol_type = other RNA
actcaaaggaagaagccagt

SEQ ID NO: 1508 - RNA, 20 nt, synthetic construct
  source 1..20: mol_type = other RNA
agaagcagcccagagaggcc

SEQ ID NO: 1509 - RNA, 20 nt, synthetic construct
  source 1..20: mol_type = other RNA
agaggcctggcggtgcctcc

SEQ ID NO: 1510 - RNA, 20 nt, synthetic construct
  source 1..20: mol_type = other RNA
agccccgccccacttccccg

SEQ ID NO: 1511 - RNA, 20 nt, synthetic construct
  source 1..20: mol_type = other RNA
aggaagagcctcctgggcag

SEQ ID NO: 1512 - RNA, 20 nt, synthetic construct
  source 1..20: mol_type = other RNA
agggacgaggggaggtgaga

SEQ ID NO: 1513 - RNA, 20 nt, synthetic construct
  source 1..20: mol_type = other RNA
atcattcgggaggcctgact

SEQ ID NO: 1514 - RNA, 20 nt, synthetic construct
  source 1..20: mol_type = other RNA
atggcccttccctgggaatc

SEQ ID NO: 1515 - RNA, 20 nt, synthetic construct
  source 1..20: mol_type = other RNA
atgtaatgacaggctgacat

SEQ ID NO: 1516 - RNA, 20 nt, synthetic construct
  source 1..20: mol_type = other RNA
cagaactccctggggactga

SEQ ID NO: 1517 - RNA, 20 nt, synthetic construct
  source 1..20: mol_type = other RNA
cagaatcagattcaggagac

SEQ ID NO: 1518 - RNA, 20 nt, synthetic construct
  source 1..20: mol_type = other RNA
cagaggtcataagcaggttg

SEQ ID NO: 1519 - RNA, 20 nt, synthetic construct
  source 1..20: mol_type = other RNA
cagtgtcaggccctcagctc

SEQ ID NO: 1520 - RNA, 20 nt, synthetic construct
  source 1..20: mol_type = other RNA
catacatactgaaaagttct

SEQ ID NO: 1521 - RNA, 20 nt, synthetic construct
  source 1..20: mol_type = other RNA
cataccaagagagaggatga

SEQ ID NO: 1522 - RNA, 20 nt, synthetic construct
  source 1..20: mol_type = other RNA
ccactctgacccccagggtc

SEQ ID NO: 1523 - RNA, 20 nt, synthetic construct
  source 1..20: mol_type = other RNA
ccagagtgagacctggctct

SEQ ID NO: 1524 - RNA, 20 nt, synthetic construct
  source 1..20: mol_type = other RNA
ccaggctgctcaacgctgct

SEQ ID NO: 1525 - RNA, 20 nt, synthetic construct
  source 1..20: mol_type = other RNA
ccaggtgaggggcgcctggg

SEQ ID NO: 1526 - RNA, 20 nt, synthetic construct
  source 1..20: mol_type = other RNA
cccaggccacagaagcagtc

SEQ ID NO: 1527 - RNA, 20 nt, synthetic construct
  source 1..20: mol_type = other RNA
cctcatttgtcttcattccc

SEQ ID NO: 1528 - RNA, 20 nt, synthetic construct
  source 1..20: mol_type = other RNA
cctgtgtccctggcatcact

SEQ ID NO: 1529 - RNA, 20 nt, synthetic construct
  source 1..20: mol_type = other RNA
cgcgtcaggctctgggctga

SEQ ID NO: 1530 - RNA, 20 nt, synthetic construct
  source 1..20: mol_type = other RNA
ctcatgtttgttctccacca

SEQ ID NO: 1531 - RNA, 20 nt, synthetic construct
  source 1..20: mol_type = other RNA
ctcgtgcaaaggccctggcg

SEQ ID NO: 1532 - RNA, 20 nt, synthetic construct
  source 1..20: mol_type = other RNA
ctcgtgttctcgtgcttctc

SEQ ID NO: 1533 - RNA, 20 nt, synthetic construct
  source 1..20: mol_type = other RNA
ctgatggcacctatgacatc

SEQ ID NO: 1534 - RNA, 20 nt, synthetic construct
  source 1..20: mol_type = other RNA
ctgccttccaaacagccaga

SEQ ID NO: 1535 - RNA, 20 nt, synthetic construct
  source 1..20: mol_type = other RNA
ctgggaggagaaagacgcca

SEQ ID NO: 1536 - RNA, 20 nt, synthetic construct
  source 1..20: mol_type = other RNA
ctggggtggaagtaggtgtc

SEQ ID NO: 1537 - RNA, 20 nt, synthetic construct
  source 1..20: mol_type = other RNA
ctgtgcctctgacgcctgtc

SEQ ID NO: 1538 - RNA, 20 nt, synthetic construct
  source 1..20: mol_type = other RNA
gaaaagcagcaggtcttcgg

SEQ ID NO: 1539 - RNA, 20 nt, synthetic construct
  source 1..20: mol_type = other RNA
gaaatggagcactgccccca

SEQ ID NO: 1540 - RNA, 20 nt, synthetic construct
  source 1..20: mol_type = other RNA
gaatgctctcagcgtgctgg

SEQ ID NO: 1541 - RNA, 20 nt, synthetic construct
  source 1..20: mol_type = other RNA
gagacctggctcttggccta

SEQ ID NO: 1542 - RNA, 20 nt, synthetic construct
  source 1..20: mol_type = other RNA
gaggagaaagacgccatggc

SEQ ID NO: 1543 - RNA, 20 nt, synthetic construct
  source 1..20: mol_type = other RNA
gcaggtcttcggtggggcgc

SEQ ID NO: 1544 - RNA, 20 nt, synthetic construct
  source 1..20: mol_type = other RNA
gccggaggctacttctgaaa

SEQ ID NO: 1545 - RNA, 20 nt, synthetic construct
  source 1..20: mol_type = other RNA
gcctctccagcacgtgagac

SEQ ID NO: 1546 - RNA, 20 nt, synthetic construct
  source 1..20: mol_type = other RNA
gccttgctcttgatctgggg

SEQ ID NO: 1547 - RNA, 20 nt, synthetic construct
  source 1..20: mol_type = other RNA
gcttgttaggaagagcctcc

SEQ ID NO: 1548 - RNA, 20 nt, synthetic construct
  source 1..20: mol_type = other RNA
ggagaatgctctcagcgtgc

SEQ ID NO: 1549 - RNA, 20 nt, synthetic construct
  source 1..20: mol_type = other RNA
ggatgttgacctattcctga

SEQ ID NO: 1550 - RNA, 20 nt, synthetic construct
  source 1..20: mol_type = other RNA
gggaagtagaggggatcatg

SEQ ID NO: 1551 - RNA, 20 nt, synthetic construct
  source 1..20: mol_type = other RNA
gggctgccttgctcttgatc

SEQ ID NO: 1552 - RNA, 20 nt, synthetic construct
  source 1..20: mol_type = other RNA
gggtatctctgtgatcattt

SEQ ID NO: 1553 - RNA, 20 nt, synthetic construct
  source 1..20: mol_type = other RNA
ggtataaaagggttccaggc

SEQ ID NO: 1554 - RNA, 20 nt, synthetic construct
  source 1..20: mol_type = other RNA
gtcaagagacgactagaacc

SEQ ID NO: 1555 - RNA, 20 nt, synthetic construct
  source 1..20: mol_type = other RNA
gtgaccaggtgaggggcgcc

SEQ ID NO: 1556 - RNA, 20 nt, synthetic construct
  source 1..20: mol_type = other RNA
gtgtctgggacatgagtgtc

SEQ ID NO: 1557 - RNA, 20 nt, synthetic construct
  source 1..20: mol_type = other RNA
tacccctcaagctttggggc

SEQ ID NO: 1558 - RNA, 20 nt, synthetic construct
  source 1..20: mol_type = other RNA
tactggtgtcagctgacact

SEQ ID NO: 1559 - RNA, 20 nt, synthetic construct
  source 1..20: mol_type = other RNA
tagactcgcacagaactccc

SEQ ID NO: 1560 - RNA, 20 nt, synthetic construct
  source 1..20: mol_type = other RNA
tcagcctacccctcaagctt

SEQ ID NO: 1561 - RNA, 20 nt, synthetic construct
  source 1..20: mol_type = other RNA
tcatagatgaagactcaccc

SEQ ID NO: 1562 - RNA, 20 nt, synthetic construct
  source 1..20: mol_type = other RNA
tcccagggcacttctgagca

SEQ ID NO: 1563 - RNA, 20 nt, synthetic construct
  source 1..20: mol_type = other RNA
tcgagccccgcgtcaggctc

SEQ ID NO: 1564 - RNA, 20 nt, synthetic construct
  source 1..20: mol_type = other RNA
tctccaccatggcccttccc

SEQ ID NO: 1565 - RNA, 20 nt, synthetic construct
  source 1..20: mol_type = other RNA
tctctctctctctctctctg

SEQ ID NO: 1566 - RNA, 20 nt, synthetic construct
  source 1..20: mol_type = other RNA
tctctctgtggagcacgtca

SEQ ID NO: 1567 - RNA, 20 nt, synthetic construct
  source 1..20: mol_type = other RNA
tctgtgtaatccctcccctc

SEQ ID NO: 1568 - RNA, 20 nt, synthetic construct
  source 1..20: mol_type = other RNA
tgacaaatatgttgagcaag

SEQ ID NO: 1569 - RNA, 20 nt, synthetic construct
  source 1..20: mol_type = other RNA
tgagtccactagctaagcac

SEQ ID NO: 1570 - RNA, 20 nt, synthetic construct
  source 1..20: mol_type = other RNA
tgcaggccctcctgtgtccc

SEQ ID NO: 1571 - RNA, 20 nt, synthetic construct
  source 1..20: mol_type = other RNA
tgggctgatggctcggagcc

SEQ ID NO: 1572 - RNA, 20 nt, synthetic construct
  source 1..20: mol_type = other RNA
ttgtatctccagagagataa

SEQ ID NO: 1573 - RNA, 20 nt, synthetic construct
  source 1..20: mol_type = other RNA
accccccagacaggcgtcag

SEQ ID NO: 1574 - RNA, 20 nt, synthetic construct
  source 1..20: mol_type = other RNA
acgagctgttgccactgccc

SEQ ID NO: 1575 - RNA, 20 nt, synthetic construct
  source 1..20: mol_type = other RNA
acttgaggagttaagagaaa

SEQ ID NO: 1576 - RNA, 20 nt, synthetic construct
  source 1..20: mol_type = other RNA
acttgctcaacatatttgtc

SEQ ID NO: 1577 - RNA, 20 nt, synthetic construct
  source 1..20: mol_type = other RNA
agaaagcgtccagatgtcat

SEQ ID NO: 1578 - RNA, 20 nt, synthetic construct
  source 1..20: mol_type = other RNA
agaatggccctctgggaccc

SEQ ID NO: 1579 - RNA, 20 nt, synthetic construct
  source 1..20: mol_type = other RNA
agacagagcatgagcagggg

SEQ ID NO: 1580 - RNA, 20 nt, synthetic construct
  source 1..20: mol_type = other RNA
agatcaaaagcgtcaccctt

SEQ ID NO: 1581 - RNA, 20 nt, synthetic construct
  source 1..20: mol_type = other RNA
agccccaaagcttgaggggt

SEQ ID NO: 1582 - RNA, 20 nt, synthetic construct
  source 1..20: mol_type = other RNA
agctagcaagtaccaaaagg

SEQ ID NO: 1583 - RNA, 20 nt, synthetic construct
  source 1..20: mol_type = other RNA
agctgttgccactgcccagg

SEQ ID NO: 1584 - RNA, 20 nt, synthetic construct
  source 1..20: mol_type = other RNA
aggaactgacgtttggagat

SEQ ID NO: 1585 - RNA, 20 nt, synthetic construct
  source 1..20: mol_type = other RNA
agtcaggaaggccagagctg

SEQ ID NO: 1586 - RNA, 20 nt, synthetic construct
  source 1..20: mol_type = other RNA
agtgatgccagggacacagg

SEQ ID NO: 1587 - RNA, 20 nt, synthetic construct
  source 1..20: mol_type = other RNA
atagcacctcaggcagacac

SEQ ID NO: 1588 - RNA, 20 nt, synthetic construct
  source 1..20: mol_type = other RNA
atcctctctcttggtatgtg

SEQ ID NO: 1589 - RNA, 20 nt, synthetic construct
  source 1..20: mol_type = other RNA
atttgtcaggggttcccatc

SEQ ID NO: 1590 - RNA, 20 nt, synthetic construct
  source 1..20: mol_type = other RNA
caacagtagggcagggtggg

SEQ ID NO: 1591 - RNA, 20 nt, synthetic construct
  source 1..20: mol_type = other RNA
cacagctagcaagtaccaaa

SEQ ID NO: 1592 - RNA, 20 nt, synthetic construct
  source 1..20: mol_type = other RNA
caccctgggtcacatatggg

SEQ ID NO: 1593 - RNA, 20 nt, synthetic construct
  source 1..20: mol_type = other RNA
cactgaggccaagtgatgcc

SEQ ID NO: 1594 - RNA, 20 nt, synthetic construct
  source 1..20: mol_type = other RNA
cagaatcggaaacaggctcc

SEQ ID NO: 1595 - RNA, 20 nt, synthetic construct
  source 1..20: mol_type = other RNA
cagaatggcagggcaggggg

SEQ ID NO: 1596 - RNA, 20 nt, synthetic construct
  source 1..20: mol_type = other RNA
cagccatctggctgtttgga

SEQ ID NO: 1597 - RNA, 20 nt, synthetic construct
  source 1..20: mol_type = other RNA
caggggaggggcagagagag

SEQ ID NO: 1598 - RNA, 20 nt, synthetic construct
  source 1..20: mol_type = other RNA
caggggttcccatcaggaat

SEQ ID NO: 1599 - RNA, 20 nt, synthetic construct
  source 1..20: mol_type = other RNA
cataggtgccatcagtcccc

SEQ ID NO: 1600 - RNA, 20 nt, synthetic construct
  source 1..20: mol_type = other RNA
catatgggagggtgatgaga

SEQ ID NO: 1601 - RNA, 20 nt, synthetic construct
  source 1..20: mol_type = other RNA
ccaagtgatgccagggacac

SEQ ID NO: 1602 - RNA, 20 nt, synthetic construct
  source 1..20: mol_type = other RNA
ccagggaatgaagacaaatg

SEQ ID NO: 1603 - RNA, 20 nt, synthetic construct
  source 1..20: mol_type = other RNA
ccccttcatgatgcagtggc

SEQ ID NO: 1604 - RNA, 20 nt, synthetic construct
  source 1..20: mol_type = other RNA
ccctacacttgctgtggacc

SEQ ID NO: 1605 - RNA, 20 nt, synthetic construct
  source 1..20: mol_type = other RNA
cctgagcagaccccccagac

SEQ ID NO: 1606 - RNA, 20 nt, synthetic construct
  source 1..20: mol_type = other RNA
cctgctgtggctgcaacagt

SEQ ID NO: 1607 - RNA, 20 nt, synthetic construct
  source 1..20: mol_type = other RNA
ccttttgaaagaccttcatc

SEQ ID NO: 1608 - RNA, 20 nt, synthetic construct
  source 1..20: mol_type = other RNA
ctcctctctctcagtatttg

SEQ ID NO: 1609 - RNA, 20 nt, synthetic construct
  source 1..20: mol_type = other RNA
ctctctggagatacaatccg

SEQ ID NO: 1610 - RNA, 20 nt, synthetic construct
  source 1..20: mol_type = other RNA
cttaaccgactgcgccaccc

SEQ ID NO: 1611 - RNA, 20 nt, synthetic construct
  source 1..20: mol_type = other RNA
ctttctcctcccagattccc

SEQ ID NO: 1612 - RNA, 20 nt, synthetic construct
  source 1..20: mol_type = other RNA
cttttccaggaggcaccgcc

SEQ ID NO: 1613 - RNA, 20 nt, synthetic construct
  source 1..20: mol_type = other RNA
gaactgcctgggggctgtgg

SEQ ID NO: 1614 - RNA, 20 nt, synthetic construct
  source 1..20: mol_type = other RNA
gagagagacagagcatgagc

SEQ ID NO: 1615 - RNA, 20 nt, synthetic construct
  source 1..20: mol_type = other RNA
gagctgagggcctgacactg

SEQ ID NO: 1616 - RNA, 20 nt, synthetic construct
  source 1..20: mol_type = other RNA
gaggagatgtatgtgtgggc

SEQ ID NO: 1617 - RNA, 20 nt, synthetic construct
  source 1..20: mol_type = other RNA
gaggcacagaatggcagggc

SEQ ID NO: 1618 - RNA, 20 nt, synthetic construct
  source 1..20: mol_type = other RNA
gcaagagagtctcccaagtc

SEQ ID NO: 1619 - RNA, 20 nt, synthetic construct
  source 1..20: mol_type = other RNA
gccaggtctcactctgggca

SEQ ID NO: 1620 - RNA, 20 nt, synthetic construct
  source 1..20: mol_type = other RNA
gctgtttggaaggcagccag

SEQ ID NO: 1621 - RNA, 20 nt, synthetic construct
  source 1..20: mol_type = other RNA
ggagacacagaatcggaaac

SEQ ID NO: 1622 - RNA, 20 nt, synthetic construct
  source 1..20: mol_type = other RNA
ggctccccttccccgtcttg

SEQ ID NO: 1623 - RNA, 20 nt, synthetic construct
  source 1..20: mol_type = other RNA
gggctggttgtgtcttggtg

SEQ ID NO: 1624 - RNA, 20 nt, synthetic construct
  source 1..20: mol_type = other RNA
ggggtggaatatggaacttg

SEQ ID NO: 1625 - RNA, 20 nt, synthetic construct
  source 1..20: mol_type = other RNA
gggtcagagtggtgggccat

SEQ ID NO: 1626 - RNA, 20 nt, synthetic construct
  source 1..20: mol_type = other RNA
ggtcactttaatagcacctc

SEQ ID NO: 1627 - RNA, 20 nt, synthetic construct
  source 1..20: mol_type = other RNA
gtctaacatccttttccagg

SEQ ID NO: 1628 - RNA, 20 nt, synthetic construct
  source 1..20: mol_type = other RNA
gtgctggagaggctggagtc

SEQ ID NO: 1629 - RNA, 20 nt, synthetic construct
  source 1..20: mol_type = other RNA
tatgtgaggcacagaatggc

SEQ ID NO: 1630 - RNA, 20 nt, synthetic construct
  source 1..20: mol_type = other RNA
tccaccccagatcaagagca

SEQ ID NO: 1631 - RNA, 20 nt, synthetic construct
  source 1..20: mol_type = other RNA
tccagtctcacgtgctggag

SEQ ID NO: 1632 - RNA, 20 nt, synthetic construct
  source 1..20: mol_type = other RNA
tcccctacatgctggtgccc

SEQ ID NO: 1633 - RNA, 20 nt, synthetic construct
  source 1..20: mol_type = other RNA
tcctcccagattcccaggga

SEQ ID NO: 1634 - RNA, 20 nt, synthetic construct
  source 1..20: mol_type = other RNA
tctcaacttacggatttttc

SEQ ID NO: 1635 - RNA, 20 nt, synthetic construct
  source 1..20: mol_type = other RNA
tcttttctgggggagtgctc

SEQ ID NO: 1636 - RNA, 20 nt, synthetic construct
  source 1..20: mol_type = other RNA
tgcctgggggctgtggaggg

SEQ ID NO: 1637 - RNA, 20 nt, synthetic construct
  source 1..20: mol_type = other RNA
tgcgtctaacatccttttcc

SEQ ID NO: 1638 - RNA, 20 nt, synthetic construct
  source 1..20: mol_type = other RNA
tgctcagaagtgccctggga

SEQ ID NO: 1639 - RNA, 20 nt, synthetic construct
  source 1..20: mol_type = other RNA
tggagaggctggagtcagga

SEQ ID NO: 1640 - RNA, 20 nt, synthetic construct
  source 1..20: mol_type = other RNA
tgggccagccccaaagcttg

SEQ ID NO: 1641 - RNA, 20 nt, synthetic construct
  source 1..20: mol_type = other RNA
tgggccataggccaagagcc

SEQ ID NO: 1642 - RNA, 20 nt, synthetic construct
  source 1..20: mol_type = other RNA
tgtggctgcaacagtagggc

SEQ ID NO: 1643 - RNA, 20 nt, synthetic construct
  source 1..20: mol_type = other RNA
ttctgcttcttgaccacgcc

SEQ ID NO: 1644 - RNA, 20 nt, synthetic construct
  source 1..20: mol_type = other RNA
ttgcatcaacgcagttcttc

SEQ ID NO: 1645 - RNA, 20 nt, synthetic construct
  source 1..20: mol_type = other RNA
ttggaaggcagccagagggg

SEQ ID NO: 1646 - RNA, 20 nt, synthetic construct
  source 1..20: mol_type = other RNA
tttacctttcaagctatctg

SEQ ID NO: 1647 - RNA, 20 nt, synthetic construct
  source 1..20: mol_type = other RNA
tttcagaactgaaattttct

SEQ ID NO: 1648 - RNA, 20 nt, synthetic construct
  source 1..20: mol_type = other RNA
tttctaggttgactggggaa

SEQ ID NO: 1649 - RNA, 20 nt, synthetic construct
  source 1..20: mol_type = other RNA
agcaagtaccaaaaggaggc

SEQ ID NO: 1650 - RNA, 20 nt, synthetic construct
  source 1..20: mol_type = other RNA
cagaccacggggaagtgggg

SEQ ID NO: 1651 - RNA, 20 nt, synthetic construct
  source 1..20: mol_type = other RNA
catcagcccagagcctgacg

SEQ ID NO: 1652 - RNA, 20 nt, synthetic construct
  source 1..20: mol_type = other RNA
gagagagggagacacagaat

SEQ ID NO: 1653 - RNA, 20 nt, synthetic construct
  source 1..20: mol_type = other RNA
gatcgtgacctggctgaagc

SEQ ID NO: 1654 - RNA, 20 nt, synthetic construct
  source 1..20: mol_type = other RNA
gatggtctggtctcaactta

SEQ ID NO: 1655 - RNA, 20 nt, synthetic construct
  source 1..20: mol_type = other RNA
ggcgaatttaggtcagacca

SEQ ID NO: 1656 - RNA, 20 nt, synthetic construct
  source 1..20: mol_type = other RNA
gggcctgcagacccccaagc

SEQ ID NO: 1657 - RNA, 20 nt, synthetic construct
  source 1..20: mol_type = other RNA
taggtcaacatccctcttca

SEQ ID NO: 1658 - RNA, 20 nt, synthetic construct
  source 1..20: mol_type = other RNA
tccatttcagaagtagcctc

SEQ ID NO: 1659 - RNA, 20 nt, synthetic construct
  source 1..20: mol_type = other RNA
tgacgcggggctcgaactca

SEQ ID NO: 1660 - RNA, 20 nt, synthetic construct
  source 1..20: mol_type = other RNA
tgccattctctcctccctca

SEQ ID NO: 1661 - RNA, 20 nt, synthetic construct
  source 1..20: mol_type = other RNA
aaatgagggtttttttttgg

SEQ ID NO: 1662 - RNA, 20 nt, synthetic construct
  source 1..20: mol_type = other RNA
aacagtagggcagggtggga

SEQ ID NO: 1663 - RNA, 20 nt, synthetic construct
  source 1..20: mol_type = other RNA
aactgcctgggggctgtgga

SEQ ID NO: 1664 - RNA, 20 nt, synthetic construct
  source 1..20: mol_type = other RNA
aacttttcagtatgtatggt

SEQ ID NO: 1665 - RNA, 20 nt, synthetic construct
  source 1..20: mol_type = other RNA
aagacctggcccactcatct

SEQ ID NO: 1666 - RNA, 20 nt, synthetic construct
  source 1..20: mol_type = other RNA
aatgagggtttttttttggg

SEQ ID NO: 1667 - RNA, 20 nt, synthetic construct
  source 1..20: mol_type = other RNA
acaaatgagggttttttttt

SEQ ID NO: 1668 - RNA, 20 nt, synthetic construct
  source 1..20: mol_type = other RNA
acagagcatgagcaggggag

SEQ ID NO: 1669 - RNA, 20 nt, synthetic construct
  source 1..20: mol_type = other RNA
accctgggggtcagagtggt

SEQ ID NO: 1670 - RNA, 20 nt, synthetic construct
  source 1..20: mol_type = other RNA
accctgggtcacatatggga

SEQ ID NO: 1671 - RNA, 20 nt, synthetic construct
  source 1..20: mol_type = other RNA
actgaggccaagtgatgcca

SEQ ID NO: 1672 - RNA, 20 nt, synthetic construct
  source 1..20: mol_type = other RNA
acttttcagtatgtatggtg

SEQ ID NO: 1673 - RNA, 20 nt, synthetic construct
  source 1..20: mol_type = other RNA
agaatggcagggcaggggga

SEQ ID NO: 1674 - RNA, 20 nt, synthetic construct
  source 1..20: mol_type = other RNA
agaccacggggaagtggggc

SEQ ID NO: 1675 - RNA, 20 nt, synthetic construct
  source 1..20: mol_type = other RNA
agagagacagagcatgagca

SEQ ID NO: 1676 - RNA, 20 nt, synthetic construct
  source 1..20: mol_type = other RNA
agcctccggccagaccctgg

SEQ ID NO: 1677 - RNA, 20 nt, synthetic construct
  source 1..20: mol_type = other RNA
aggcacagaatggcagggca

SEQ ID NO: 1678 - RNA, 20 nt, synthetic construct
  source 1..20: mol_type = other RNA
aggcaccgccaggcctctct

SEQ ID NO: 1679 - RNA, 20 nt, synthetic construct
  source 1..20: mol_type = other RNA
aggggaggggcagagagaga

SEQ ID NO: 1680 - RNA, 20 nt, synthetic construct
  source 1..20: mol_type = other RNA
agggtttttttttggggggg

SEQ ID NO: 1681 - RNA, 20 nt, synthetic construct
  source 1..20: mol_type = other RNA
aggtcagaccacggggaagt

SEQ ID NO: 1682 - RNA, 20 nt, synthetic construct
  source 1..20: mol_type = other RNA
agtggtggaatatacaccct

SEQ ID NO: 1683 - RNA, 20 nt, synthetic construct
  source 1..20: mol_type = other RNA
agttcagcagactcttttct

SEQ ID NO: 1684 - RNA, 20 nt, synthetic construct
  source 1..20: mol_type = other RNA
atacaccctgggtcacatat

SEQ ID NO: 1685 - RNA, 20 nt, synthetic construct
  source 1..20: mol_type = other RNA
ataggtgccatcagtcccca

SEQ ID NO: 1686 - RNA, 20 nt, synthetic construct
  source 1..20: mol_type = other RNA
atatgggagggtgatgagaa

SEQ ID NO: 1687 - RNA, 20 nt, synthetic construct
  source 1..20: mol_type = other RNA
atcacagagatacccctcct

SEQ ID NO: 1688 - RNA, 20 nt, synthetic construct
  source 1..20: mol_type = other RNA
atcagcccagagcctgacgc

SEQ ID NO: 1689 - RNA, 20 nt, synthetic construct
  source 1..20: mol_type = other RNA
atgagggtttttttttgggg

SEQ ID NO: 1690 - RNA, 20 nt, synthetic construct
  source 1..20: mol_type = other RNA
atgtgaggcacagaatggca

SEQ ID NO: 1691 - RNA, 20 nt, synthetic construct
  source 1..20: mol_type = other RNA
caaatgagggtttttttttg

SEQ ID NO: 1692 - RNA, 20 nt, synthetic construct
  source 1..20: mol_type = other RNA
caacatccctcttcacggct

SEQ ID NO: 1693 - RNA, 20 nt, synthetic construct
  source 1..20: mol_type = other RNA
caagagccaggtctcactct

SEQ ID NO: 1694 - RNA, 20 nt, synthetic construct
  source 1..20: mol_type = other RNA
caagcagcgttgagcagcct

SEQ ID NO: 1695 - RNA, 20 nt, synthetic construct
  source 1..20: mol_type = other RNA
cacagagatacccctcctgg

SEQ ID NO: 1696 - RNA, 20 nt, synthetic construct
  source 1..20: mol_type = other RNA
caccttctcacctttgggtg

SEQ ID NO: 1697 - RNA, 20 nt, synthetic construct
  source 1..20: mol_type = other RNA
cagggaatgaagacaaatga

SEQ ID NO: 1698 - RNA, 20 nt, synthetic construct
  source 1..20: mol_type = other RNA
ccagactgcttctgtggcct

SEQ ID NO: 1699 - RNA, 20 nt, synthetic construct
  source 1..20: mol_type = other RNA
cctacacttgctgtggacca

SEQ ID NO: 1700 - RNA, 20 nt, synthetic construct
  source 1..20: mol_type = other RNA
cctcccagattcccagggaa

SEQ ID NO: 1701 - RNA, 20 nt, synthetic construct
  source 1..20: mol_type = other RNA
cgaatttaggtcagaccacg

SEQ ID NO: 1702 - RNA, 20 nt, synthetic construct
  source 1..20: mol_type = other RNA
cgagtctagcagcagttggg

SEQ ID NO: 1703 - RNA, 20 nt, synthetic construct
  source 1..20: mol_type = other RNA
ctcatcaccttctcaccttt

SEQ ID NO: 1704 - RNA, 20 nt, synthetic construct
  source 1..20: mol_type = other RNA
ctgcaacagtagggcagggt

SEQ ID NO: 1705 - RNA, 20 nt, synthetic construct
  source 1..20: mol_type = other RNA
ctgctgtggctgcaacagta

SEQ ID NO: 1706 - RNA, 20 nt, synthetic construct
  source 1..20: mol_type = other RNA
ctgcttctcagaactgcctg

SEQ ID NO: 1707 - RNA, 20 nt, synthetic construct
  source 1..20: mol_type = other RNA
ctgtttggaaggcagccaga

SEQ ID NO: 1708 - RNA, 20 nt, synthetic construct
  source 1..20: mol_type = other RNA
cttgctcaacatatttgtca

SEQ ID NO: 1709 - RNA, 20 nt, synthetic construct
  source 1..20: mol_type = other RNA
cttttcagtatgtatggtgg

SEQ ID NO: 1710 - RNA, 20 nt, synthetic construct
  source 1..20: mol_type = other RNA
gaaattttctaggttgactg

SEQ ID NO: 1711 - RNA, 20 nt, synthetic construct
  source 1..20: mol_type = other RNA
gaatggccctctgggaccca

SEQ ID NO: 1712 - RNA, 20 nt, synthetic construct
  source 1..20: mol_type = other RNA
gacagagcatgagcagggga

SEQ ID NO: 1713 - RNA, 20 nt, synthetic construct
  source 1..20: mol_type = other RNA
gaccacggggaagtggggcg

SEQ ID NO: 1714 - RNA, 20 nt, synthetic construct
  source 1..20: mol_type = other RNA
gactccccttgctaccatgg

SEQ ID NO: 1715 - RNA, 20 nt, synthetic construct
  source 1..20: mol_type = other RNA
gagagacagagcatgagcag

SEQ ID NO: 1716 - RNA, 20 nt, synthetic construct
  source 1..20: mol_type = other RNA
gagagagagagatcccctct

SEQ ID NO: 1717 - RNA, 20 nt, synthetic construct
  source 1..20: mol_type = other RNA
gaggcacagaatggccctct

SEQ ID NO: 1718 - RNA, 20 nt, synthetic construct
  source 1..20: mol_type = other RNA
gagggaggagatgtatgtgt

SEQ ID NO: 1719 - RNA, 20 nt, synthetic construct
  source 1..20: mol_type = other RNA
gagggtttttttttgggggg

SEQ ID NO: 1720 - RNA, 20 nt, synthetic construct
  source 1..20: mol_type = other RNA
gcacagaatggcagggcagg

SEQ ID NO: 1721 - RNA, 20 nt, synthetic construct
  source 1..20: mol_type = other RNA
gccatgctcagaagtgccct

SEQ ID NO: 1722 - RNA, 20 nt, synthetic construct
  source 1..20: mol_type = other RNA
gccattctctcctccctcac

SEQ ID NO: 1723 - RNA, 20 nt, synthetic construct
  source 1..20: mol_type = other RNA
gcgaatttaggtcagaccac

SEQ ID NO: 1724 - RNA, 20 nt, synthetic construct
  source 1..20: mol_type = other RNA
gcgagtctagcagcagttgg

SEQ ID NO: 1725 - RNA, 20 nt, synthetic construct
  source 1..20: mol_type = other RNA
gctccccttccccgtcttga

SEQ ID NO: 1726 - RNA, 20 nt, synthetic construct
  source 1..20: mol_type = other RNA
gctgcttctcagaactgcct

SEQ ID NO: 1727 - RNA, 20 nt, synthetic construct
  source 1..20: mol_type = other RNA
ggactccccttgctaccatg

SEQ ID NO: 1728 - RNA, 20 nt, synthetic construct
  source 1..20: mol_type = other RNA
ggcacagaatggcagggcag

SEQ ID NO: 1729 - RNA, 20 nt, synthetic construct
  source 1..20: mol_type = other RNA
ggccagccccaaagcttgag

SEQ ID NO: 1730 - RNA, 20 nt, synthetic construct
  source 1..20: mol_type = other RNA
gggccagccccaaagcttga

SEQ ID NO: 1731 - RNA, 20 nt, synthetic construct
  source 1..20: mol_type = other RNA
gggggagtgctcaggtggtg

SEQ ID NO: 1732 - RNA, 20 nt, synthetic construct
  source 1..20: mol_type = other RNA
ggtcagaccacggggaagtg

SEQ ID NO: 1733 - RNA, 20 nt, synthetic construct
  source 1..20: mol_type = other RNA
gtagcctccggccagaccct

SEQ ID NO: 1734 - RNA, 20 nt, synthetic construct
  source 1..20: mol_type = other RNA
gtcaggaaggccagagctga

SEQ ID NO: 1735 - RNA, 20 nt, synthetic construct
  source 1..20: mol_type = other RNA
gtgatgccagggacacagga

SEQ ID NO: 1736 - RNA, 20 nt, synthetic construct
  source 1..20: mol_type = other RNA
gtgcgagtctagcagcagtt

SEQ ID NO: 1737 - RNA, 20 nt, synthetic construct
  source 1..20: mol_type = other RNA
gtggctgcaacagtagggca

SEQ ID NO: 1738 - RNA, 20 nt, synthetic construct
  source 1..20: mol_type = other RNA
gttcagcagactcttttctg

SEQ ID NO: 1739 - RNA, 20 nt, synthetic construct
  source 1..20: mol_type = other RNA
tagcctccggccagaccctg

SEQ ID NO: 1740 - RNA, 20 nt, synthetic construct
  source 1..20: mol_type = other RNA
tcacagagatacccctcctg

SEQ ID NO: 1741 - RNA, 20 nt, synthetic construct
  source 1..20: mol_type = other RNA
tcaccttctcacctttgggt

SEQ ID NO: 1742 - RNA, 20 nt, synthetic construct
  source 1..20: mol_type = other RNA
tcagcccagagcctgacgcg

SEQ ID NO: 1743 - RNA, 20 nt, synthetic construct
  source 1..20: mol_type = other RNA
tctaggttgactggggaaag

SEQ ID NO: 1744 - RNA, 20 nt, synthetic construct
  source 1..20: mol_type = other RNA
tctgcttcttgaccacgcca

SEQ ID NO: 1745 - RNA, 20 nt, synthetic construct
  source 1..20: mol_type = other RNA
tgaaattttctaggttgact

SEQ ID NO: 1746 - RNA, 20 nt, synthetic construct
  source 1..20: mol_type = other RNA
tgagggtttttttttggggg

SEQ ID NO: 1747 - RNA, 20 nt, synthetic construct
  source 1..20: mol_type = other RNA
tgcgagtctagcagcagttg

SEQ ID NO: 1748 - RNA, 20 nt, synthetic construct
  source 1..20: mol_type = other RNA
tgcttctcagaactgcctgg

SEQ ID NO: 1749 - RNA, 20 nt, synthetic construct
  source 1..20: mol_type = other RNA
tggaaggcagccagagggga

SEQ ID NO: 1750 - RNA, 20 nt, synthetic construct
  source 1..20: mol_type = other RNA
tggactccccttgctaccat

SEQ ID NO: 1751 - RNA, 20 nt, synthetic construct
  source 1..20: mol_type = other RNA
tgggggagtgctcaggtggt

SEQ ID NO: 1752 - RNA, 20 nt, synthetic construct
  source 1..20: mol_type = other RNA
tgtttggaaggcagccagag

SEQ ID NO: 1753 - RNA, 20 nt, synthetic construct
  source 1..20: mol_type = other RNA
ttcaatgtttatttattttt

SEQ ID NO: 1754 - RNA, 20 nt, synthetic construct
  source 1..20: mol_type = other RNA
ttcagcagactcttttctgg

SEQ ID NO: 1755 - RNA, 20 nt, synthetic construct
  source 1..20: mol_type = other RNA
ttctaggttgactggggaaa

SEQ ID NO: 1756 - RNA, 20 nt, synthetic construct
  source 1..20: mol_type = other RNA
ttgctcaacatatttgtcag

SEQ ID NO: 1757 - RNA, 20 nt, synthetic construct
  source 1..20: mol_type = other RNA
tttctcctcccagattccca

SEQ ID NO: 1758 - RNA, 20 nt, synthetic construct
  source 1..20: mol_type = other RNA
aaaaggaggccggtctctgg

SEQ ID NO: 1759 - RNA, 20 nt, synthetic construct
  source 1..20: mol_type = other RNA
aaatatcatttccccccaac

SEQ ID NO: 1760 - RNA, 20 nt, synthetic construct
  source 1..20: mol_type = other RNA
aacgcagttcttcaggtttc

SEQ ID NO: 1761 - RNA, 20 nt, synthetic construct
  source 1..20: mol_type = other RNA
aagtcaggcctcccgaatga

SEQ ID NO: 1762 - RNA, 20 nt, synthetic construct
  source 1..20: mol_type = other RNA
aagttcagcagactcttttc

SEQ ID NO: 1763 - RNA, 20 nt, synthetic construct
  source 1..20: mol_type = other RNA
accaaaaggaggccggtctc

SEQ ID NO: 1764 - RNA, 20 nt, synthetic construct
  source 1..20: mol_type = other RNA
agagaaaaggaactgacgtt

SEQ ID NO: 1765 - RNA, 20 nt, synthetic construct
  source 1..20: mol_type = other RNA
agagagagagagatcccctc

SEQ ID NO: 1766 - RNA, 20 nt, synthetic construct
  source 1..20: mol_type = other RNA
agattcccagggaagggcca

SEQ ID NO: 1767 - RNA, 20 nt, synthetic construct
  source 1..20: mol_type = other RNA
aggtctcactctgggcaagg

SEQ ID NO: 1768 - RNA, 20 nt, synthetic construct
  source 1..20: mol_type = other RNA
agtagcctccggccagaccc

SEQ ID NO: 1769 - RNA, 20 nt, synthetic construct
  source 1..20: mol_type = other RNA
atcaccttctcacctttggg

SEQ ID NO: 1770 - RNA, 20 nt, synthetic construct
  source 1..20: mol_type = other RNA
atctatgacattggaagacc

SEQ ID NO: 1771 - RNA, 20 nt, synthetic construct
  source 1..20: mol_type = other RNA
atgtgaccttgaagatggtc

SEQ ID NO: 1772 - RNA, 20 nt, synthetic construct
  source 1..20: mol_type = other RNA
attacatgtgaccttgaaga

SEQ ID NO: 1773 - RNA, 20 nt, synthetic construct
  source 1..20: mol_type = other RNA
caagaacttttcagtatgta

SEQ ID NO: 1774 - RNA, 20 nt, synthetic construct
  source 1..20: mol_type = other RNA
cacaacctgcttatgacctc

SEQ ID NO: 1775 - RNA, 20 nt, synthetic construct
  source 1..20: mol_type = other RNA
cagacagccatctggctgtt

SEQ ID NO: 1776 - RNA, 20 nt, synthetic construct
  source 1..20: mol_type = other RNA
cagggcagggggagggcttt

SEQ ID NO: 1777 - RNA, 20 nt, synthetic construct
  source 1..20: mol_type = other RNA
caggtgctccctccccagcc

SEQ ID NO: 1778 - RNA, 20 nt, synthetic construct
  source 1..20: mol_type = other RNA
cagtatgtatggtgggggag

SEQ ID NO: 1779 - RNA, 20 nt, synthetic construct
  source 1..20: mol_type = other RNA
cagtctcctgaatctgattc

SEQ ID NO: 1780 - RNA, 20 nt, synthetic construct
  source 1..20: mol_type = other RNA
ccaagcagcgttgagcagcc

SEQ ID NO: 1781 - RNA, 20 nt, synthetic construct
  source 1..20: mol_type = other RNA
ccacccaggcgcccctcacc

SEQ ID NO: 1782 - RNA, 20 nt, synthetic construct
  source 1..20: mol_type = other RNA
ccagaccctgggggtcagag

SEQ ID NO: 1783 - RNA, 20 nt, synthetic construct
  source 1..20: mol_type = other RNA
cccctctacttccccagcca

SEQ ID NO: 1784 - RNA, 20 nt, synthetic construct
  source 1..20: mol_type = other RNA
cctaacaagcatatgattca

SEQ ID NO: 1785 - RNA, 20 nt, synthetic construct
  source 1..20: mol_type = other RNA
cctgcagacccccaagccgg

SEQ ID NO: 1786 - RNA, 20 nt, synthetic construct
  source 1..20: mol_type = other RNA
cctgcagacccccaagctgg

SEQ ID NO: 1787 - RNA, 20 nt, synthetic construct
  source 1..20: mol_type = other RNA
ccttccatcatcctctctct

SEQ ID NO: 1788 - RNA, 20 nt, synthetic construct
  source 1..20: mol_type = other RNA
cgccatgctcagaagtgccc

SEQ ID NO: 1789 - RNA, 20 nt, synthetic construct
  source 1..20: mol_type = other RNA
cggaccgcgagatcgtgacc

SEQ ID NO: 1790 - RNA, 20 nt, synthetic construct
  source 1..20: mol_type = other RNA
ctcactccctacacttgctg

SEQ ID NO: 1791 - RNA, 20 nt, synthetic construct
  source 1..20: mol_type = other RNA
ctgaaattttctaggttgac

SEQ ID NO: 1792 - RNA, 20 nt, synthetic construct
  source 1..20: mol_type = other RNA
ctgaaccctcccctacatgc

SEQ ID NO: 1793 - RNA, 20 nt, synthetic construct
  source 1..20: mol_type = other RNA
ctgagccctcccctacatgc

SEQ ID NO: 1794 - RNA, 20 nt, synthetic construct
  source 1..20: mol_type = other RNA
ctggactccccttgctacca

SEQ ID NO: 1795 - RNA, 20 nt, synthetic construct
  source 1..20: mol_type = other RNA
ctgggggagtgctcaggtgg

SEQ ID NO: 1796 - RNA, 20 nt, synthetic construct
  source 1..20: mol_type = other RNA
cttgaccgagtcctgtcacc

SEQ ID NO: 1797 - RNA, 20 nt, synthetic construct
  source 1..20: mol_type = other RNA
ctttcaagctatctgaggtt

SEQ ID NO: 1798 - RNA, 20 nt, synthetic construct
  source 1..20: mol_type = other RNA
gaaaagccagactgcttctg

SEQ ID NO: 1799 - RNA, 20 nt, synthetic construct
  source 1..20: mol_type = other RNA
gaaacccagtgcttagctag

SEQ ID NO: 1800 - RNA, 20 nt, synthetic construct
  source 1..20: mol_type = other RNA
gaacccttttatacctgctg

SEQ ID NO: 1801 - RNA, 20 nt, synthetic construct
  source 1..20: mol_type = other RNA
gaacttttcagtatgtatgg

SEQ ID NO: 1802 - RNA, 20 nt, synthetic construct
  source 1..20: mol_type = other RNA
gaagacctggcccactcatc

SEQ ID NO: 1803 - RNA, 20 nt, synthetic construct
  source 1..20: mol_type = other RNA
gaagatccagtctcacgtgc

SEQ ID NO: 1804 - RNA, 20 nt, synthetic construct
  source 1..20: mol_type = other RNA
gaatatcatttccccccaac

SEQ ID NO: 1805 - RNA, 20 nt, synthetic construct
  source 1..20: mol_type = other RNA
gacaaatgagggtttttttt

SEQ ID NO: 1806 - RNA, 20 nt, synthetic construct
  source 1..20: mol_type = other RNA
gaccctgggggtcagagtgg

SEQ ID NO: 1807 - RNA, 20 nt, synthetic construct
  source 1..20: mol_type = other RNA
gagcccccttcatgatgcag

SEQ ID NO: 1808 - RNA, 20 nt, synthetic construct
  source 1..20: mol_type = other RNA
gaggcaccgccaggcctctc

SEQ ID NO: 1809 - RNA, 20 nt, synthetic construct
  source 1..20: mol_type = other RNA
gagtgctcaggtggtgggga

SEQ ID NO: 1810 - RNA, 20 nt, synthetic construct
  source 1..20: mol_type = other RNA
gagtggtggaatatacaccc

SEQ ID NO: 1811 - RNA, 20 nt, synthetic construct
  source 1..20: mol_type = other RNA
gatcacagagatacccctcc

SEQ ID NO: 1812 - RNA, 20 nt, synthetic construct
  source 1..20: mol_type = other RNA
gccagactgcttctgtggcc

SEQ ID NO: 1813 - RNA, 20 nt, synthetic construct
  source 1..20: mol_type = other RNA
gctcatcaccttctcacctt

SEQ ID NO: 1814 - RNA, 20 nt, synthetic construct
  source 1..20: mol_type = other RNA
gctgcaacagtagggcaggg

SEQ ID NO: 1815 - RNA, 20 nt, synthetic construct
  source 1..20: mol_type = other RNA
gctgggcaaatttcacaatc

SEQ ID NO: 1816 - RNA, 20 nt, synthetic construct
  source 1..20: mol_type = other RNA
ggagggaggagatgtatgtg

SEQ ID NO: 1817 - RNA, 20 nt, synthetic construct
  source 1..20: mol_type = other RNA
ggctgcttctcagaactgcc

SEQ ID NO: 1818 - RNA, 20 nt, synthetic construct
  source 1..20: mol_type = other RNA
gtcaacagatgacgctacct

SEQ ID NO: 1819 - RNA, 20 nt, synthetic construct
  source 1..20: mol_type = other RNA
gtctcacgtgctggagaggc

SEQ ID NO: 1820 - RNA, 20 nt, synthetic construct
  source 1..20: mol_type = other RNA
gtttttttttgggggggggg

SEQ ID NO: 1821 - RNA, 20 nt, synthetic construct
  source 1..20: mol_type = other RNA
taggtcagaccacggggaag

SEQ ID NO: 1822 - RNA, 20 nt, synthetic construct
  source 1..20: mol_type = other RNA
tatacaccctgggtcacata

SEQ ID NO: 1823 - RNA, 20 nt, synthetic construct
  source 1..20: mol_type = other RNA
tatgtatggtgggggagtgg

SEQ ID NO: 1824 - RNA, 20 nt, synthetic construct
  source 1..20: mol_type = other RNA
tattcacaccattatctctc

SEQ ID NO: 1825 - RNA, 20 nt, synthetic construct
  source 1..20: mol_type = other RNA
tcaacatccctcttcacggc

SEQ ID NO: 1826 - RNA, 20 nt, synthetic construct
  source 1..20: mol_type = other RNA
tcagaactgcctgggggctg

SEQ ID NO: 1827 - RNA, 20 nt, synthetic construct
  source 1..20: mol_type = other RNA
tcagtatttgaggcacagaa

SEQ ID NO: 1828 - RNA, 20 nt, synthetic construct
  source 1..20: mol_type = other RNA
tctagcagcagttggggggc

SEQ ID NO: 1829 - RNA, 20 nt, synthetic construct
  source 1..20: mol_type = other RNA
tgaggcacagaatggccctc

SEQ ID NO: 1830 - RNA, 20 nt, synthetic construct
  source 1..20: mol_type = other RNA
tgagtcttcatctatgacat

SEQ ID NO: 1831 - RNA, 20 nt, synthetic construct
  source 1..20: mol_type = other RNA
tgggaaggtgttagaacccc

SEQ ID NO: 1832 - RNA, 20 nt, synthetic construct
  source 1..20: mol_type = other RNA
tgtgcgagtctagcagcagt

SEQ ID NO: 1833 - RNA, 20 nt, synthetic construct
  source 1..20: mol_type = other RNA
tgtgtccttgacctgctcag

SEQ ID NO: 1834 - RNA, 20 nt, synthetic construct
  source 1..20: mol_type = other RNA
ttcccagggaagggccatgg

SEQ ID NO: 1835 - RNA, 20 nt, synthetic construct
  source 1..20: mol_type = other RNA
ttggatgtcagacagccatc

SEQ ID NO: 1836 - RNA, 20 nt, synthetic construct
  source 1..20: mol_type = other RNA
ttggggggctggttgtgtct

SEQ ID NO: 1837 - RNA, 20 nt, synthetic construct
  source 1..20: mol_type = other RNA
ttggtatgtgaggcacagaa

SEQ ID NO: 1838 - RNA, 20 nt, synthetic construct
  source 1..20: mol_type = other RNA
tttcaatgtttatttatttt

SEQ ID NO: 1839 - RNA, 20 nt, synthetic construct
  source 1..20: mol_type = other RNA
tttctgggggagtgctcagg

SEQ ID NO: 1840 - RNA, 20 nt, synthetic construct
  source 1..20: mol_type = other RNA
tttggggggggggtggaata

SEQ ID NO: 1841 - RNA, 20 nt, synthetic construct
  source 1..20: mol_type = other RNA
aaaaatcacaggaggggtca

SEQ ID NO: 1842 - RNA, 20 nt, synthetic construct
  source 1..20: mol_type = other RNA
aaaacgtaaagacagaaaat

SEQ ID NO: 1843 - RNA, 20 nt, synthetic construct
  source 1..20: mol_type = other RNA
aaaagaatcagcagagcagg

SEQ ID NO: 1844 - RNA, 20 nt, synthetic construct
  source 1..20: mol_type = other RNA
aaacatcaggggggttctgc

SEQ ID NO: 1845 - RNA, 20 nt, synthetic construct
  source 1..20: mol_type = other RNA
aaagagataaaaatcacagg

SEQ ID NO: 1846 - RNA, 20 nt, synthetic construct
  source 1..20: mol_type = other RNA
aaagtgtccaacttcggctc

SEQ ID NO: 1847 - RNA, 20 nt, synthetic construct
  source 1..20: mol_type = other RNA
aacgtttatttttaagagag

SEQ ID NO: 1848 - RNA, 20 nt, synthetic construct
  source 1..20: mol_type = other RNA
aactgagagttcctgcagaa

SEQ ID NO: 1849 - RNA, 20 nt, synthetic construct
  source 1..20: mol_type = other RNA
aactttctctttcctgtgga

SEQ ID NO: 1850 - RNA, 20 nt, synthetic construct
  source 1..20: mol_type = other RNA
aataccactgagacacggag

SEQ ID NO: 1851 - RNA, 20 nt, synthetic construct
  source 1..20: mol_type = other RNA
aatgtttaaataaataaata

SEQ ID NO: 1852 - RNA, 20 nt, synthetic construct
  source 1..20: mol_type = other RNA
acagaccgatttctggagag

SEQ ID NO: 1853 - RNA, 20 nt, synthetic construct
  source 1..20: mol_type = other RNA
acaggaggatggggctcaga

SEQ ID NO: 1854 - RNA, 20 nt, synthetic construct
  source 1..20: mol_type = other RNA
accagaagcttcccaaagcc

SEQ ID NO: 1855 - RNA, 20 nt, synthetic construct
  source 1..20: mol_type = other RNA
acccacgcacctgtgccagg

SEQ ID NO: 1856 - RNA, 20 nt, synthetic construct
  source 1..20: mol_type = other RNA
acctccctttgccatgtccc

SEQ ID NO: 1857 - RNA, 20 nt, synthetic construct
  source 1..20: mol_type = other RNA
agaagaggagaagattctgg

SEQ ID NO: 1858 - RNA, 20 nt, synthetic construct
  source 1..20: mol_type = other RNA
agaccctgaattgatacaga

SEQ ID NO: 1859 - RNA, 20 nt, synthetic construct
  source 1..20: mol_type = other RNA
agagcaactcacatatatcc

SEQ ID NO: 1860 - RNA, 20 nt, synthetic construct
  source 1..20: mol_type = other RNA
agagtgaattaggtgaggac

SEQ ID NO: 1861 - RNA, 20 nt, synthetic construct
  source 1..20: mol_type = other RNA
agcctgattgagagtgaatt

SEQ ID NO: 1862 - RNA, 20 nt, synthetic construct
  source 1..20: mol_type = other RNA
agctccaaaggcctgtgggc

SEQ ID NO: 1863 - RNA, 20 nt, synthetic construct
  source 1..20: mol_type = other RNA
agtgggggaggggcagagag

SEQ ID NO: 1864 - RNA, 20 nt, synthetic construct
  source 1..20: mol_type = other RNA
agttggagctccacatacca

SEQ ID NO: 1865 - RNA, 20 nt, synthetic construct
  source 1..20: mol_type = other RNA
ataggtactctcccttaagg

SEQ ID NO: 1866 - RNA, 20 nt, synthetic construct
  source 1..20: mol_type = other RNA
atctgggagagagtaagacg

SEQ ID NO: 1867 - RNA, 20 nt, synthetic construct
  source 1..20: mol_type = other RNA
atgggggctgggcctgggtg

SEQ ID NO: 1868 - RNA, 20 nt, synthetic construct
  source 1..20: mol_type = other RNA
atgtcccaggatctcctgcc

SEQ ID NO: 1869 - RNA, 20 nt, synthetic construct
  source 1..20: mol_type = other RNA
attctacgactaaaaacatc

SEQ ID NO: 1870 - RNA, 20 nt, synthetic construct
  source 1..20: mol_type = other RNA
caaaggaatagcagccatca

SEQ ID NO: 1871 - RNA, 20 nt, synthetic construct
  source 1..20: mol_type = other RNA
caaggtgccaggtcaaccaa

SEQ ID NO: 1872 - RNA, 20 nt, synthetic construct
  source 1..20: mol_type = other RNA
cacaaaagaatcagcagagc

SEQ ID NO: 1873 - RNA, 20 nt, synthetic construct
  source 1..20: mol_type = other RNA
cacataggtactctccctta

SEQ ID NO: 1874 - RNA, 20 nt, synthetic construct
  source 1..20: mol_type = other RNA
cagacggaacattttctatg

SEQ ID NO: 1875 - RNA, 20 nt, synthetic construct
  source 1..20: mol_type = other RNA
cagactccaaagcaggattc

SEQ ID NO: 1876 - RNA, 20 nt, synthetic construct
  source 1..20: mol_type = other RNA
cagcacttaacggcaagtag

SEQ ID NO: 1877 - RNA, 20 nt, synthetic construct
  source 1..20: mol_type = other RNA
cagccatcaaggtgggcaca

SEQ ID NO: 1878 - RNA, 20 nt, synthetic construct
  source 1..20: mol_type = other RNA
cagctttaggtgtaaagaac

SEQ ID NO: 1879 - RNA, 20 nt, synthetic construct
  source 1..20: mol_type = other RNA
caggcatgagctgtcagcac

SEQ ID NO: 1880 - RNA, 20 nt, synthetic construct
  source 1..20: mol_type = other RNA
cagtagcattgacttttgtg

SEQ ID NO: 1881 - RNA, 20 nt, synthetic construct
  source 1..20: mol_type = other RNA
ccagtgagggaggcaagaag

SEQ ID NO: 1882 - RNA, 20 nt, synthetic construct
  source 1..20: mol_type = other RNA
cccccccccagaagctccaa

SEQ ID NO: 1883 - RNA, 20 nt, synthetic construct
  source 1..20: mol_type = other RNA
ccctgccaggatgacattta

SEQ ID NO: 1884 - RNA, 20 nt, synthetic construct
  source 1..20: mol_type = other RNA
cctaaccgactgagccaccc

SEQ ID NO: 1885 - RNA, 20 nt, synthetic construct
  source 1..20: mol_type = other RNA
cgtaaggtaattcgcacaca

SEQ ID NO: 1886 - RNA, 20 nt, synthetic construct
  source 1..20: mol_type = other RNA
cgtagctaggagctgcctcg

SEQ ID NO: 1887 - RNA, 20 nt, synthetic construct
  source 1..20: mol_type = other RNA
ctattttccaactgtgcgta

SEQ ID NO: 1888 - RNA, 20 nt, synthetic construct
  source 1..20: mol_type = other RNA
ctcaggacgcttgggcatgt

SEQ ID NO: 1889 - RNA, 20 nt, synthetic construct
  source 1..20: mol_type = other RNA
ctccctactaggggagtctc

SEQ ID NO: 1890 - RNA, 20 nt, synthetic construct
  source 1..20: mol_type = other RNA
ctgctgcacgcgcaacgtga

SEQ ID NO: 1891 - RNA, 20 nt, synthetic construct
  source 1..20: mol_type = other RNA
ctgcttccctctcaccctta

SEQ ID NO: 1892 - RNA, 20 nt, synthetic construct
  source 1..20: mol_type = other RNA
ctgggcctgggtgaggggca

SEQ ID NO: 1893 - RNA, 20 nt, synthetic construct
  source 1..20: mol_type = other RNA
ctgggtgtgcacatggcgtg

SEQ ID NO: 1894 - RNA, 20 nt, synthetic construct
  source 1..20: mol_type = other RNA
cttcctgggaagagagtctg

SEQ ID NO: 1895 - RNA, 20 nt, synthetic construct
  source 1..20: mol_type = other RNA
ctttgccaaagaccaactgg

SEQ ID NO: 1896 - RNA, 20 nt, synthetic construct
  source 1..20: mol_type = other RNA
gaaggttggggaggcgggga

SEQ ID NO: 1897 - RNA, 20 nt, synthetic construct
  source 1..20: mol_type = other RNA
gaagtgagactctgaaccaa

SEQ ID NO: 1898 - RNA, 20 nt, synthetic construct
  source 1..20: mol_type = other RNA
gacaaagagataaaaatcac

SEQ ID NO: 1899 - RNA, 20 nt, synthetic construct
  source 1..20: mol_type = other RNA
gacaaggctcctacatgtgc

SEQ ID NO: 1900 - RNA, 20 nt, synthetic construct
  source 1..20: mol_type = other RNA
gacacgtgtggtagaagaac

SEQ ID NO: 1901 - RNA, 20 nt, synthetic construct
  source 1..20: mol_type = other RNA
gagagaatagcccaaggaag

SEQ ID NO: 1902 - RNA, 20 nt, synthetic construct
  source 1..20: mol_type = other RNA
gagatcaccatgggaggtaa

SEQ ID NO: 1903 - RNA, 20 nt, synthetic construct
  source 1..20: mol_type = other RNA
gagcagggcaaggatcagga

SEQ ID NO: 1904 - RNA, 20 nt, synthetic construct
  source 1..20: mol_type = other RNA
gagtgagatagagcagggca

SEQ ID NO: 1905 - RNA, 20 nt, synthetic construct
  source 1..20: mol_type = other RNA
gatagagcagggcaaggatc

SEQ ID NO: 1906 - RNA, 20 nt, synthetic construct
  source 1..20: mol_type = other RNA
gatgacatttaagggactag

SEQ ID NO: 1907 - RNA, 20 nt, synthetic construct
  source 1..20: mol_type = other RNA
gattgagagtgaattaggtg

SEQ ID NO: 1908 - RNA, 20 nt, synthetic construct
  source 1..20: mol_type = other RNA
gatttgtgataaacccactc

SEQ ID NO: 1909 - RNA, 20 nt, synthetic construct
  source 1..20: mol_type = other RNA
gcagagacctgcccactccc

SEQ ID NO: 1910 - RNA, 20 nt, synthetic construct
  source 1..20: mol_type = other RNA
gcagatgagagaatagccca

SEQ ID NO: 1911 - RNA, 20 nt, synthetic construct
  source 1..20: mol_type = other RNA
gcagcgctatccattccccc

SEQ ID NO: 1912 - RNA, 20 nt, synthetic construct
  source 1..20: mol_type = other RNA
gcattctagataatacacat

SEQ ID NO: 1913 - RNA, 20 nt, synthetic construct
  source 1..20: mol_type = other RNA
gccacccaggcgcccctgcc

SEQ ID NO: 1914 - RNA, 20 nt, synthetic construct
  source 1..20: mol_type = other RNA
gcgcaacgtgaaggttgggg

SEQ ID NO: 1915 - RNA, 20 nt, synthetic construct
  source 1..20: mol_type = other RNA
gctacaaatcactccctact

SEQ ID NO: 1916 - RNA, 20 nt, synthetic construct
  source 1..20: mol_type = other RNA
gctccacataccaaggtgcc

SEQ ID NO: 1917 - RNA, 20 nt, synthetic construct
  source 1..20: mol_type = other RNA
gctgctagaatgctctgctc

SEQ ID NO: 1918 - RNA, 20 nt, synthetic construct
  source 1..20: mol_type = other RNA
ggaagcccttcctactcttg

SEQ ID NO: 1919 - RNA, 20 nt, synthetic construct
  source 1..20: mol_type = other RNA
ggacagatctacaccactac

SEQ ID NO: 1920 - RNA, 20 nt, synthetic construct
  source 1..20: mol_type = other RNA
ggagacacagactccaaagc

SEQ ID NO: 1921 - RNA, 20 nt, synthetic construct
  source 1..20: mol_type = other RNA
ggagctgcctcgagggcctc

SEQ ID NO: 1922 - RNA, 20 nt, synthetic construct
  source 1..20: mol_type = other RNA
ggctggtaacgctctaaatt

SEQ ID NO: 1923 - RNA, 20 nt, synthetic construct
  source 1..20: mol_type = other RNA
gggagtctgaacaaccagtg

SEQ ID NO: 1924 - RNA, 20 nt, synthetic construct
  source 1..20: mol_type = other RNA
gggccgcgatcagtcagacc

SEQ ID NO: 1925 - RNA, 20 nt, synthetic construct
  source 1..20: mol_type = other RNA
gggtgcagctgcacgtagct

SEQ ID NO: 1926 - RNA, 20 nt, synthetic construct
  source 1..20: mol_type = other RNA
ggtgtaaagaacaggacagg

SEQ ID NO: 1927 - RNA, 20 nt, synthetic construct
  source 1..20: mol_type = other RNA
gtaaacttaatcccaagagg

SEQ ID NO: 1928 - RNA, 20 nt, synthetic construct
  source 1..20: mol_type = other RNA
gtaaaggagtgagatagagc

SEQ ID NO: 1929 - RNA, 20 nt, synthetic construct
  source 1..20: mol_type = other RNA
gtcacccacgcacctgtgcc

SEQ ID NO: 1930 - RNA, 20 nt, synthetic construct
  source 1..20: mol_type = other RNA
gtctgaacaaccagtgaggg

SEQ ID NO: 1931 - RNA, 20 nt, synthetic construct
  source 1..20: mol_type = other RNA
gtgggtctgagacccgtgtc

SEQ ID NO: 1932 - RNA, 20 nt, synthetic construct
  source 1..20: mol_type = other RNA
taaactcaaccttctaatct

SEQ ID NO: 1933 - RNA, 20 nt, synthetic construct
  source 1..20: mol_type = other RNA
tagaatgctctgctcaggac

SEQ ID NO: 1934 - RNA, 20 nt, synthetic construct
  source 1..20: mol_type = other RNA
tagtccatgaaaattattga

SEQ ID NO: 1935 - RNA, 20 nt, synthetic construct
  source 1..20: mol_type = other RNA
tcacctgagactcatctgtc

SEQ ID NO: 1936 - RNA, 20 nt, synthetic construct
  source 1..20: mol_type = other RNA
tcagtaaacttaatcccaag

SEQ ID NO: 1937 - RNA, 20 nt, synthetic construct
  source 1..20: mol_type = other RNA
tcttgactccaagtagctcc

SEQ ID NO: 1938 - RNA, 20 nt, synthetic construct
  source 1..20: mol_type = other RNA
tgaggacaaagctcttggag

SEQ ID NO: 1939 - RNA, 20 nt, synthetic construct
  source 1..20: mol_type = other RNA
tgagtcacccttaaattgcc

SEQ ID NO: 1940 - RNA, 20 nt, synthetic construct
  source 1..20: mol_type = other RNA
tgcacacgtgcaagtggggg

SEQ ID NO: 1941 - RNA, 20 nt, synthetic construct
  source 1..20: mol_type = other RNA
tgggaagagagtctgagggc

SEQ ID NO: 1942 - RNA, 20 nt, synthetic construct
  source 1..20: mol_type = other RNA
tgggagagagtaagacgagg

SEQ ID NO: 1943 - RNA, 20 nt, synthetic construct
  source 1..20: mol_type = other RNA
tgggcatgtaggcctcctca

SEQ ID NO: 1944 - RNA, 20 nt, synthetic construct
  source 1..20: mol_type = other RNA
tgtgctgtagagcggagcaa

SEQ ID NO: 1945 - RNA, 20 nt, synthetic construct
  source 1..20: mol_type = other RNA
tgtttggagatcaccatggg

SEQ ID NO: 1946 - RNA, 20 nt, synthetic construct
  source 1..20: mol_type = other RNA
ttaggtgtaaagaacaggac

SEQ ID NO: 1947 - RNA, 20 nt, synthetic construct
  source 1..20: mol_type = other RNA
ttcctccaccagaactgaca

SEQ ID NO: 1948 - RNA, 20 nt, synthetic construct
  source 1..20: mol_type = other RNA
ttggggaggcggggaaggaa

SEQ ID NO: 1949 - RNA, 20 nt, synthetic construct
  source 1..20: mol_type = other RNA
agacccctgaccggtgcctc

SEQ ID NO: 1950 - RNA, 20 nt, synthetic construct
  source 1..20: mol_type = other RNA
aggcaaataccactgagaca

SEQ ID NO: 1951 - RNA, 20 nt, synthetic construct
  source 1..20: mol_type = other RNA
caacgtgaaggttggggagg

SEQ ID NO: 1952 - RNA, 20 nt, synthetic construct
  source 1..20: mol_type = other RNA
cagccggagagacccctgac

SEQ ID NO: 1953 - RNA, 20 nt, synthetic construct
  source 1..20: mol_type = other RNA
cagtcagaccaggatggaga

SEQ ID NO: 1954 - RNA, 20 nt, synthetic construct
  source 1..20: mol_type = other RNA
ctgcttacatcccagacaga

SEQ ID NO: 1955 - RNA, 20 nt, synthetic construct
  source 1..20: mol_type = other RNA
gaacacagacacggggcacc

SEQ ID NO: 1956 - RNA, 20 nt, synthetic construct
  source 1..20: mol_type = other RNA
gcaccccagcctgcctgttt

SEQ ID NO: 1957 - RNA, 20 nt, synthetic construct
  source 1..20: mol_type = other RNA
gggcgcctgggtggctcagt

SEQ ID NO: 1958 - RNA, 20 nt, synthetic construct
  source 1..20: mol_type = other RNA
gggctcagaaggggcatcag

SEQ ID NO: 1959 - RNA, 20 nt, synthetic construct
  source 1..20: mol_type = other RNA
gtattctatgtgctgtagag

SEQ ID NO: 1960 - RNA, 20 nt, synthetic construct
  source 1..20: mol_type = other RNA
gttcagcttgagatcttcta

SEQ ID NO: 1961 - RNA, 20 nt, synthetic construct
  source 1..20: mol_type = other RNA
tcccgcacagaacacagaca

SEQ ID NO: 1962 - RNA, 20 nt, synthetic construct
  source 1..20: mol_type = other RNA
tcggttaaagtgtccaactt

SEQ ID NO: 1963 - RNA, 20 nt, synthetic construct
  source 1..20: mol_type = other RNA
tctcagcagaagagagcagc

SEQ ID NO: 1964 - RNA, 20 nt, synthetic construct
  source 1..20: mol_type = other RNA
tttacagaatcagcacttaa

SEQ ID NO: 1965 - RNA, 20 nt, synthetic construct
  source 1..20: mol_type = other RNA
aaaaagacgtcataaaaaat

SEQ ID NO: 1966 - RNA, 20 nt, synthetic construct
  source 1..20: mol_type = other RNA
aaaagacgtcataaaaaatg

SEQ ID NO: 1967 - RNA, 20 nt, synthetic construct
  source 1..20: mol_type = other RNA
aaacattagtgaatagttgt

SEQ ID NO: 1968 - RNA, 20 nt, synthetic construct
  source 1..20: mol_type = other RNA
aaagaacaggacaggaggat

SEQ ID NO: 1969 - RNA, 20 nt, synthetic construct
  source 1..20: mol_type = other RNA
aaatacactgaccagccctg

SEQ ID NO: 1970 - RNA, 20 nt, synthetic construct
  source 1..20: mol_type = other RNA
aacacagacacggggcaccc

SEQ ID NO: 1971 - RNA, 20 nt, synthetic construct
  source 1..20: mol_type = other RNA
aacattagtgaatagttgtg

SEQ ID NO: 1972 - RNA, 20 nt, synthetic construct
  source 1..20: mol_type = other RNA
aacgtgaaggttggggaggc

SEQ ID NO: 1973 - RNA, 20 nt, synthetic construct
  source 1..20: mol_type = other RNA
aagaacaggacaggaggatg

SEQ ID NO: 1974 - RNA, 20 nt, synthetic construct
  source 1..20: mol_type = other RNA
aagagataaaaatcacagga

SEQ ID NO: 1975 - RNA, 20 nt, synthetic construct
  source 1..20: mol_type = other RNA
aagattctggagggcgcgat

SEQ ID NO: 1976 - RNA, 20 nt, synthetic construct
  source 1..20: mol_type = other RNA
aagccagggagtcccttcct

SEQ ID NO: 1977 - RNA, 20 nt, synthetic construct
  source 1..20: mol_type = other RNA
aagtcctggagataagtatg

SEQ ID NO: 1978 - RNA, 20 nt, synthetic construct
  source 1..20: mol_type = other RNA
aatgggtggacaccatcctt

SEQ ID NO: 1979 - RNA, 20 nt, synthetic construct
  source 1..20: mol_type = other RNA
acacagacacggggcacccg

SEQ ID NO: 1980 - RNA, 20 nt, synthetic construct
  source 1..20: mol_type = other RNA
acccttgggctgttaagagt

SEQ ID NO: 1981 - RNA, 20 nt, synthetic construct
  source 1..20: mol_type = other RNA
acctgtttggagatcaccat

SEQ ID NO: 1982 - RNA, 20 nt, synthetic construct
  source 1..20: mol_type = other RNA
acgtgaaggttggggaggcg

SEQ ID NO: 1983 - RNA, 20 nt, synthetic construct
  source 1..20: mol_type = other RNA
acgtttatttttaagagaga

SEQ ID NO: 1984 - RNA, 20 nt, synthetic construct
  source 1..20: mol_type = other RNA
agagataaaaatcacaggag

SEQ ID NO: 1985 - RNA, 20 nt, synthetic construct
  source 1..20: mol_type = other RNA
agattctggagggcgcgatg

SEQ ID NO: 1986 - RNA, 20 nt, synthetic construct
  source 1..20: mol_type = other RNA
agccatcaaggtgggcacaa

SEQ ID NO: 1987 - RNA, 20 nt, synthetic construct
  source 1..20: mol_type = other RNA
aggaggatggggctcagaag

SEQ ID NO: 1988 - RNA, 20 nt, synthetic construct
  source 1..20: mol_type = other RNA
aggcatgagctgtcagcaca

SEQ ID NO: 1989 - RNA, 20 nt, synthetic construct
  source 1..20: mol_type = other RNA
aggggagtctcaggacgctt

SEQ ID NO: 1990 - RNA, 20 nt, synthetic construct
  source 1..20: mol_type = other RNA
agtagcattgacttttgtga

SEQ ID NO: 1991 - RNA, 20 nt, synthetic construct
  source 1..20: mol_type = other RNA
atattcgttgatggctatct

SEQ ID NO: 1992 - RNA, 20 nt, synthetic construct
  source 1..20: mol_type = other RNA
caaagaagcagaaaatggtg

SEQ ID NO: 1993 - RNA, 20 nt, synthetic construct
  source 1..20: mol_type = other RNA
cacacgtgcaagtgggggag

SEQ ID NO: 1994 - RNA, 20 nt, synthetic construct
  source 1..20: mol_type = other RNA
cacagacacggggcacccgg

SEQ ID NO: 1995 - RNA, 20 nt, synthetic construct
  source 1..20: mol_type = other RNA
cacgcgcaacgtgaaggttg

SEQ ID NO: 1996 - RNA, 20 nt, synthetic construct
  source 1..20: mol_type = other RNA
cagaaaatggtggggcgcct

SEQ ID NO: 1997 - RNA, 20 nt, synthetic construct
  source 1..20: mol_type = other RNA
cagaagctccaaaggcctgt

SEQ ID NO: 1998 - RNA, 20 nt, synthetic construct
  source 1..20: mol_type = other RNA
cagaccgatttctggagaga

SEQ ID NO: 1999 - RNA, 20 nt, synthetic construct
  source 1..20: mol_type = other RNA
caggaggatggggctcagaa

SEQ ID NO: 2000 - RNA, 20 nt, synthetic construct
  source 1..20: mol_type = other RNA
catcttgacgcccagctctt

SEQ ID NO: 2001 - RNA, 20 nt, synthetic construct
  source 1..20: mol_type = other RNA
ccaaagaagcagaaaatggt

SEQ ID NO: 2002 - RNA, 20 nt, synthetic construct
  source 1..20: mol_type = other RNA
ccagaagcttcccaaagcca

SEQ ID NO: 2003 - RNA, 20 nt, synthetic construct
  source 1..20: mol_type = other RNA
cccacgcacctgtgccagga

SEQ ID NO: 2004 - RNA, 20 nt, synthetic construct
  source 1..20: mol_type = other RNA
cccgcacagaacacagacac

SEQ ID NO: 2005 - RNA, 20 nt, synthetic construct
  source 1..20: mol_type = other RNA
ccgcacagaacacagacacg

SEQ ID NO: 2006 - RNA, 20 nt, synthetic construct
  source 1..20: mol_type = other RNA
cctgccaggatgacatttaa

SEQ ID NO: 2007 - RNA, 20 nt, synthetic construct
  source 1..20: mol_type = other RNA
ccttaaggaagtaaatgcct

SEQ ID NO: 2008 - RNA, 20 nt, synthetic construct
  source 1..20: mol_type = other RNA
cgcttgcacacgtgcaagtg

SEQ ID NO: 2009 - RNA, 20 nt, synthetic construct
  source 1..20: mol_type = other RNA
ctacaaatcactccctacta

SEQ ID NO: 2010 - RNA, 20 nt, synthetic construct
  source 1..20: mol_type = other RNA
ctacgactaaaaacatcagg

SEQ ID NO: 2011 - RNA, 20 nt, synthetic construct
  source 1..20: mol_type = other RNA
cttctgtggtgatgaatcct

SEQ ID NO: 2012 - RNA, 20 nt, synthetic construct
  source 1..20: mol_type = other RNA
gaaatacactgaccagccct

SEQ ID NO: 2013 - RNA, 20 nt, synthetic construct
  source 1..20: mol_type = other RNA
gaagaggagaagattctgga

SEQ ID NO: 2014 - RNA, 20 nt, synthetic construct
  source 1..20: mol_type = other RNA
gacccctgaccggtgcctcc

SEQ ID NO: 2015 - RNA, 20 nt, synthetic construct
  source 1..20: mol_type = other RNA
gagcaactcacatatatcca

SEQ ID NO: 2016 - RNA, 20 nt, synthetic construct
  source 1..20: mol_type = other RNA
gagtcacccttaaattgcca

SEQ ID NO: 2017 - RNA, 20 nt, synthetic construct
  source 1..20: mol_type = other RNA
gattctggagggcgcgatgg

SEQ ID NO: 2018 - RNA, 20 nt, synthetic construct
  source 1..20: mol_type = other RNA
gcacacgtgcaagtggggga

SEQ ID NO: 2019 - RNA, 20 nt, synthetic construct
  source 1..20: mol_type = other RNA
gcacgcgcaacgtgaaggtt

SEQ ID NO: 2020 - RNA, 20 nt, synthetic construct
  source 1..20: mol_type = other RNA
gccatcaaggtgggcacaag

SEQ ID NO: 2021 - RNA, 20 nt, synthetic construct
  source 1..20: mol_type = other RNA
gcgcgatgggggctgggcct

SEQ ID NO: 2022 - RNA, 20 nt, synthetic construct
  source 1..20: mol_type = other RNA
gcgcttgcacacgtgcaagt

SEQ ID NO: 2023 - RNA, 20 nt, synthetic construct
  source 1..20: mol_type = other RNA
gctccaaaggcctgtgggca

SEQ ID NO: 2024 - RNA, 20 nt, synthetic construct
  source 1..20: mol_type = other RNA
gcttgcacacgtgcaagtgg

SEQ ID NO: 2025 - RNA, 20 nt, synthetic construct
  source 1..20: mol_type = other RNA
ggaatagcagccatcaaggt

SEQ ID NO: 2026 - RNA, 20 nt, synthetic construct
  source 1..20: mol_type = other RNA
ggagtctgaacaaccagtga

SEQ ID NO: 2027 - RNA, 20 nt, synthetic construct
  source 1..20: mol_type = other RNA
ggcagggacctggcacatgt

SEQ ID NO: 2028 - RNA, 20 nt, synthetic construct
  source 1..20: mol_type = other RNA
gggagagagtaagacgagga

SEQ ID NO: 2029 - RNA, 20 nt, synthetic construct
  source 1..20: mol_type = other RNA
gggcatgtaggcctcctcaa

SEQ ID NO: 2030 - RNA, 20 nt, synthetic construct
  source 1..20: mol_type = other RNA
ggggcaaggtagctgagtct

SEQ ID NO: 2031 - RNA, 20 nt, synthetic construct
  source 1..20: mol_type = other RNA
gggggctgggcctgggtgag

SEQ ID NO: 2032 - RNA, 20 nt, synthetic construct
  source 1..20: mol_type = other RNA
gggtggctccctcaaccctt

SEQ ID NO: 2033 - RNA, 20 nt, synthetic construct
  source 1..20: mol_type = other RNA
gtaaggtaattcgcacacaa

SEQ ID NO: 2034 - RNA, 20 nt, synthetic construct
  source 1..20: mol_type = other RNA
gtagctaggagctgcctcga

SEQ ID NO: 2035 - RNA, 20 nt, synthetic construct
  source 1..20: mol_type = other RNA
gtcatgatctcacagtttgt

SEQ ID NO: 2036 - RNA, 20 nt, synthetic construct
  source 1..20: mol_type = other RNA
gtggatcaagccctgagaat

SEQ ID NO: 2037 - RNA, 20 nt, synthetic construct
  source 1..20: mol_type = other RNA
gtgggggaggggcagagaga

SEQ ID NO: 2038 - RNA, 20 nt, synthetic construct
  source 1..20: mol_type = other RNA
gtgtggtagaagaacaggct

SEQ ID NO: 2039 - RNA, 20 nt, synthetic construct
  source 1..20: mol_type = other RNA
taaaggagtgagatagagca

SEQ ID NO: 2040 - RNA, 20 nt, synthetic construct
  source 1..20: mol_type = other RNA
taagtcctggagataagtat

SEQ ID NO: 2041 - RNA, 20 nt, synthetic construct
  source 1..20: mol_type = other RNA
tacaaatcactccctactag

SEQ ID NO: 2042 - RNA, 20 nt, synthetic construct
  source 1..20: mol_type = other RNA
tacgactaaaaacatcaggg

SEQ ID NO: 2043 - RNA, 20 nt, synthetic construct
  source 1..20: mol_type = other RNA
tctacgactaaaaacatcag

SEQ ID NO: 2044 - RNA, 20 nt, synthetic construct
  source 1..20: mol_type = other RNA
tgaacaatcccatgtgccct

SEQ ID NO: 2045 - RNA, 20 nt, synthetic construct
  source 1..20: mol_type = other RNA
tggagggcgcgatgggggct

SEQ ID NO: 2046 - RNA, 20 nt, synthetic construct
  source 1..20: mol_type = other RNA
tgggggctgggcctgggtga

SEQ ID NO: 2047 - RNA, 20 nt, synthetic construct
  source 1..20: mol_type = other RNA
ttcctgggaagagagtctga

SEQ ID NO: 2048 - RNA, 20 nt, synthetic construct
  source 1..20: mol_type = other RNA
ttctacgactaaaaacatca

SEQ ID NO: 2049 - RNA, 20 nt, synthetic construct
  source 1..20: mol_type = other RNA
ttctgtggtgatgaatcctg

SEQ ID NO: 2050 - RNA, 20 nt, synthetic construct
  source 1..20: mol_type = other RNA
aaaaaagacgtcataaaaaa

SEQ ID NO: 2051 - RNA, 20 nt, synthetic construct
  source 1..20: mol_type = other RNA
aaaatggtggggcgcctggg

SEQ ID NO: 2052 - RNA, 20 nt, synthetic construct
  source 1..20: mol_type = other RNA
aaagccagggagtcccttcc

SEQ ID NO: 2053 - RNA, 20 nt, synthetic construct
  source 1..20: mol_type = other RNA
aacccttgggctgttaagag

SEQ ID NO: 2054 - RNA, 20 nt, synthetic construct
  source 1..20: mol_type = other RNA
aacctgtttggagatcacca

SEQ ID NO: 2055 - RNA, 20 nt, synthetic construct
  source 1..20: mol_type = other RNA
aaggcctgtgggcagggacc

SEQ ID NO: 2056 - RNA, 20 nt, synthetic construct
  source 1..20: mol_type = other RNA
aatattcgttgatggctatc

SEQ ID NO: 2057 - RNA, 20 nt, synthetic construct
  source 1..20: mol_type = other RNA
aatctaggaaagtagtttat

SEQ ID NO: 2058 - RNA, 20 nt, synthetic construct
  source 1..20: mol_type = other RNA
acaacatttttatccttctg

SEQ ID NO: 2059 - RNA, 20 nt, synthetic construct
  source 1..20: mol_type = other RNA
accaaagaagcagaaaatgg

SEQ ID NO: 2060 - RNA, 20 nt, synthetic construct
  source 1..20: mol_type = other RNA
acccatgcaatattcgttga

SEQ ID NO: 2061 - RNA, 20 nt, synthetic construct
  source 1..20: mol_type = other RNA
accttaactgctgcagtctg

SEQ ID NO: 2062 - RNA, 20 nt, synthetic construct
  source 1..20: mol_type = other RNA
actccaagtagctccaggtt

SEQ ID NO: 2063 - RNA, 20 nt, synthetic construct
  source 1..20: mol_type = other RNA
actcttgaggacaaagctct

SEQ ID NO: 2064 - RNA, 20 nt, synthetic construct
  source 1..20: mol_type = other RNA
acttaatcccaagaggaggt

SEQ ID NO: 2065 - RNA, 20 nt, synthetic construct
  source 1..20: mol_type = other RNA
agaaatacactgaccagccc

SEQ ID NO: 2066 - RNA, 20 nt, synthetic construct
  source 1..20: mol_type = other RNA
agagttggaaatatgctacg

SEQ ID NO: 2067 - RNA, 20 nt, synthetic construct
  source 1..20: mol_type = other RNA
agcgcttgcacacgtgcaag

SEQ ID NO: 2068 - RNA, 20 nt, synthetic construct
  source 1..20: mol_type = other RNA
aggaatagcagccatcaagg

SEQ ID NO: 2069 - RNA, 20 nt, synthetic construct
  source 1..20: mol_type = other RNA
agggacctggcacatgtggg

SEQ ID NO: 2070 - RNA, 20 nt, synthetic construct
  source 1..20: mol_type = other RNA
aggggcaaggtagctgagtc

SEQ ID NO: 2071 - RNA, 20 nt, synthetic construct
  source 1..20: mol_type = other RNA
atgtaggcctcctcaagggc

SEQ ID NO: 2072 - RNA, 20 nt, synthetic construct
  source 1..20: mol_type = other RNA
attaggtgaggacaggtgtc

SEQ ID NO: 2073 - RNA, 20 nt, synthetic construct
  source 1..20: mol_type = other RNA
caaaagaaataacattgtat

SEQ ID NO: 2074 - RNA, 20 nt, synthetic construct
  source 1..20: mol_type = other RNA
caaagctcttggagaggatg

SEQ ID NO: 2075 - RNA, 20 nt, synthetic construct
  source 1..20: mol_type = other RNA
caacagtaattcatttccat

SEQ ID NO: 2076 - RNA, 20 nt, synthetic construct
  source 1..20: mol_type = other RNA
caggcaccagaacaacagag

SEQ ID NO: 2077 - RNA, 20 nt, synthetic construct
  source 1..20: mol_type = other RNA
ccagaagctccaaaggcctg

SEQ ID NO: 2078 - RNA, 20 nt, synthetic construct
  source 1..20: mol_type = other RNA
ccagctgccgcttaactttg

SEQ ID NO: 2079 - RNA, 20 nt, synthetic construct
  source 1..20: mol_type = other RNA
ccatcttgacgcccagctct

SEQ ID NO: 2080 - RNA, 20 nt, synthetic construct
  source 1..20: mol_type = other RNA
ccatgtagcccctgactgca

SEQ ID NO: 2081 - RNA, 20 nt, synthetic construct
  source 1..20: mol_type = other RNA
cccttaaggaagtaaatgcc

SEQ ID NO: 2082 - RNA, 20 nt, synthetic construct
  source 1..20: mol_type = other RNA
ccttctgtggtgatgaatcc

SEQ ID NO: 2083 - RNA, 20 nt, synthetic construct
  source 1..20: mol_type = other RNA
cgcgatcagtcagaccagga

SEQ ID NO: 2084 - RNA, 20 nt, synthetic construct
  source 1..20: mol_type = other RNA
cgtgtggtagaagaacaggc

SEQ ID NO: 2085 - RNA, 20 nt, synthetic construct
  source 1..20: mol_type = other RNA
cgttctccacgtagcaatcc

SEQ ID NO: 2086 - RNA, 20 nt, synthetic construct
  source 1..20: mol_type = other RNA
ctagcccacagaccgatttc

SEQ ID NO: 2087 - RNA, 20 nt, synthetic construct
  source 1..20: mol_type = other RNA
ctccttccctcaaactatcc

SEQ ID NO: 2088 - RNA, 20 nt, synthetic construct
  source 1..20: mol_type = other RNA
ctcttatgtccattgtgagt

SEQ ID NO: 2089 - RNA, 20 nt, synthetic construct
  source 1..20: mol_type = other RNA
ctgactgcatggtctgtatg

SEQ ID NO: 2090 - RNA, 20 nt, synthetic construct
  source 1..20: mol_type = other RNA
ctggagggcgcgatgggggc

SEQ ID NO: 2091 - RNA, 20 nt, synthetic construct
  source 1..20: mol_type = other RNA
ctttgtggctagaacctgtt

SEQ ID NO: 2092 - RNA, 20 nt, synthetic construct
  source 1..20: mol_type = other RNA
gaaacattagtgaatagttg

SEQ ID NO: 2093 - RNA, 20 nt, synthetic construct
  source 1..20: mol_type = other RNA
gaacaggctgggtgtgcaca

SEQ ID NO: 2094 - RNA, 20 nt, synthetic construct
  source 1..20: mol_type = other RNA
gaagaactttctctttcctg

SEQ ID NO: 2095 - RNA, 20 nt, synthetic construct
  source 1..20: mol_type = other RNA
gaagattctggagggcgcga

SEQ ID NO: 2096 - RNA, 20 nt, synthetic construct
  source 1..20: mol_type = other RNA
gaatgggtggacaccatcct

SEQ ID NO: 2097 - RNA, 20 nt, synthetic construct
  source 1..20: mol_type = other RNA
gactcatctgtcaggtgtac

SEQ ID NO: 2098 - RNA, 20 nt, synthetic construct
  source 1..20: mol_type = other RNA
gagagttcctgcagaaaggt

SEQ ID NO: 2099 - RNA, 20 nt, synthetic construct
  source 1..20: mol_type = other RNA
gatcaagccctgagaatggg

SEQ ID NO: 2100 - RNA, 20 nt, synthetic construct
  source 1..20: mol_type = other RNA
gcaagaagaggagaagattc

SEQ ID NO: 2101 - RNA, 20 nt, synthetic construct
  source 1..20: mol_type = other RNA
gcaatcctggatttttttca

SEQ ID NO: 2102 - RNA, 20 nt, synthetic construct
  source 1..20: mol_type = other RNA
gcagaaaatggtggggcgcc

SEQ ID NO: 2103 - RNA, 20 nt, synthetic construct
  source 1..20: mol_type = other RNA
gcagaacccaagaacagcag

SEQ ID NO: 2104 - RNA, 20 nt, synthetic construct
  source 1..20: mol_type = other RNA
gctgtgacaaatgccagagt

SEQ ID NO: 2105 - RNA, 20 nt, synthetic construct
  source 1..20: mol_type = other RNA
ggacagaagacctgagcgca

SEQ ID NO: 2106 - RNA, 20 nt, synthetic construct
  source 1..20: mol_type = other RNA
ggcgcgatgggggctgggcc

SEQ ID NO: 2107 - RNA, 20 nt, synthetic construct
  source 1..20: mol_type = other RNA
gggcagggacctggcacatg

SEQ ID NO: 2108 - RNA, 20 nt, synthetic construct
  source 1..20: mol_type = other RNA
ggggggttctgcaggactcc

SEQ ID NO: 2109 - RNA, 20 nt, synthetic construct
  source 1..20: mol_type = other RNA
ggtactctcccttaaggagg

SEQ ID NO: 2110 - RNA, 20 nt, synthetic construct
  source 1..20: mol_type = other RNA
ggtcatgatctcacagtttg

SEQ ID NO: 2111 - RNA, 20 nt, synthetic construct
  source 1..20: mol_type = other RNA
gtgaacaatcccatgtgccc

SEQ ID NO: 2112 - RNA, 20 nt, synthetic construct
  source 1..20: mol_type = other RNA
taaagaacaggacaggagga

SEQ ID NO: 2113 - RNA, 20 nt, synthetic construct
  source 1..20: mol_type = other RNA
taggggagtctcaggacgct

SEQ ID NO: 2114 - RNA, 20 nt, synthetic construct
  source 1..20: mol_type = other RNA
tcagaacctggagcctgctt

SEQ ID NO: 2115 - RNA, 20 nt, synthetic construct
  source 1..20: mol_type = other RNA
tcgcacacaagggacacgtg

SEQ ID NO: 2116 - RNA, 20 nt, synthetic construct
  source 1..20: mol_type = other RNA
tctaccaaagaagcagaaaa

SEQ ID NO: 2117 - RNA, 20 nt, synthetic construct
  source 1..20: mol_type = other RNA
tgcacgcgcaacgtgaaggt

SEQ ID NO: 2118 - RNA, 20 nt, synthetic construct
  source 1..20: mol_type = other RNA
tgcactgacagctcagaacc

SEQ ID NO: 2119 - RNA, 20 nt, synthetic construct
  source 1..20: mol_type = other RNA
tgggtggctccctcaaccct

SEQ ID NO: 2120 - RNA, 20 nt, synthetic construct
  source 1..20: mol_type = other RNA
tgtcaggtgtactggatgta

SEQ ID NO: 2121 - RNA, 20 nt, synthetic construct
  source 1..20: mol_type = other RNA
tgtggatcaagccctgagaa

SEQ ID NO: 2122 - RNA, 20 nt, synthetic construct
  source 1..20: mol_type = other RNA
ttaagtcctggagataagta

SEQ ID NO: 2123 - RNA, 20 nt, synthetic construct
  source 1..20: mol_type = other RNA
ttattgaaggaaactcccag

SEQ ID NO: 2124 - RNA, 20 nt, synthetic construct
  source 1..20: mol_type = other RNA
ttgtgcccaagtttaagtcc

SEQ ID NO: 2125 - RNA, 20 nt, synthetic construct
  source 1..20: mol_type = other RNA
tttctttgccaaagaccaac

SEQ ID NO: 2126 - RNA, 20 nt, synthetic construct
  source 1..20: mol_type = other RNA
tttttcatggctgttctctc

SEQ ID NO: 2127 - RNA, 20 nt, synthetic construct
  source 1..20: mol_type = other RNA
aacagccatgaaaaaaatcc

SEQ ID NO: 2128 - RNA, 20 nt, synthetic construct
  source 1..20: mol_type = other RNA
aaccaggatagtttgaggga

SEQ ID NO: 2129 - RNA, 20 nt, synthetic construct
  source 1..20: mol_type = other RNA
aactactttcctagattaga

SEQ ID NO: 2130 - RNA, 20 nt, synthetic construct
  source 1..20: mol_type = other RNA
aagcagtcctgggagtgggc

SEQ ID NO: 2131 - RNA, 20 nt, synthetic construct
  source 1..20: mol_type = other RNA
aatcacatacatgtaacccc

SEQ ID NO: 2132 - RNA, 20 nt, synthetic construct
  source 1..20: mol_type = other RNA
aatgtcaccctggcaattta

SEQ ID NO: 2133 - RNA, 20 nt, synthetic construct
  source 1..20: mol_type = other RNA
acacctgacagatgagtctc

SEQ ID NO: 2134 - RNA, 20 nt, synthetic construct
  source 1..20: mol_type = other RNA
acttccttctgtatcaattc

SEQ ID NO: 2135 - RNA, 20 nt, synthetic construct
  source 1..20: mol_type = other RNA
agagagagagaatccaaagc

SEQ ID NO: 2136 - RNA, 20 nt, synthetic construct
  source 1..20: mol_type = other RNA
agagcatggggactggaggc

SEQ ID NO: 2137 - RNA, 20 nt, synthetic construct
  source 1..20: mol_type = other RNA
agagctttgtcctcaagagt

SEQ ID NO: 2138 - RNA, 20 nt, synthetic construct
  source 1..20: mol_type = other RNA
agatgggtgagagcagatgg

SEQ ID NO: 2139 - RNA, 20 nt, synthetic construct
  source 1..20: mol_type = other RNA
agcaccccatacttatctcc

SEQ ID NO: 2140 - RNA, 20 nt, synthetic construct
  source 1..20: mol_type = other RNA
agccttgtcagttctggtgg

SEQ ID NO: 2141 - RNA, 20 nt, synthetic construct
  source 1..20: mol_type = other RNA
agcgttaccagcccttgagg

SEQ ID NO: 2142 - RNA, 20 nt, synthetic construct
  source 1..20: mol_type = other RNA
agctaccttgcccctcaccc

SEQ ID NO: 2143 - RNA, 20 nt, synthetic construct
  source 1..20: mol_type = other RNA
aggcaggctggggtgcccgg

SEQ ID NO: 2144 - RNA, 20 nt, synthetic construct
  source 1..20: mol_type = other RNA
agggagaggtttggagatgg

SEQ ID NO: 2145 - RNA, 20 nt, synthetic construct
  source 1..20: mol_type = other RNA
agggagtgatttgtagccca

SEQ ID NO: 2146 - RNA, 20 nt, synthetic construct
  source 1..20: mol_type = other RNA
agtgggcaggtctctgcgga

SEQ ID NO: 2147 - RNA, 20 nt, synthetic construct
  source 1..20: mol_type = other RNA
agtttgagggaaggagtagc

SEQ ID NO: 2148 - RNA, 20 nt, synthetic construct
  source 1..20: mol_type = other RNA
atcactggggatgaggcatg

SEQ ID NO: 2149 - RNA, 20 nt, synthetic construct
  source 1..20: mol_type = other RNA
attaagtttactgatggagg

SEQ ID NO: 2150 - RNA, 20 nt, synthetic construct
  source 1..20: mol_type = other RNA
attgagagcatggggactgg

SEQ ID NO: 2151 - RNA, 20 nt, synthetic construct
  source 1..20: mol_type = other RNA
atttttcttgttgcacagtt

SEQ ID NO: 2152 - RNA, 20 nt, synthetic construct
  source 1..20: mol_type = other RNA
caaaatggggattaagtgtg

SEQ ID NO: 2153 - RNA, 20 nt, synthetic construct
  source 1..20: mol_type = other RNA
cacatacagaccatgcagtc

SEQ ID NO: 2154 - RNA, 20 nt, synthetic construct
  source 1..20: mol_type = other RNA
cacctaattcactctcaatc

SEQ ID NO: 2155 - RNA, 20 nt, synthetic construct
  source 1..20: mol_type = other RNA
cagcagttaaggtgttcaag

SEQ ID NO: 2156 - RNA, 20 nt, synthetic construct
  source 1..20: mol_type = other RNA
cagctcaggtcatgatctca

SEQ ID NO: 2157 - RNA, 20 nt, synthetic construct
  source 1..20: mol_type = other RNA
cagctgggagatcattgtcc

SEQ ID NO: 2158 - RNA, 20 nt, synthetic construct
  source 1..20: mol_type = other RNA
cattcagctcctgcacatgt

SEQ ID NO: 2159 - RNA, 20 nt, synthetic construct
  source 1..20: mol_type = other RNA
ccaggattcatcaccacaga

SEQ ID NO: 2160 - RNA, 20 nt, synthetic construct
  source 1..20: mol_type = other RNA
cccaggcatttacttcctta

SEQ ID NO: 2161 - RNA, 20 nt, synthetic construct
  source 1..20: mol_type = other RNA
cccttaaatgtcatcctggc

SEQ ID NO: 2162 - RNA, 20 nt, synthetic construct
  source 1..20: mol_type = other RNA
cctgggtggctcagtcggtt

SEQ ID NO: 2163 - RNA, 20 nt, synthetic construct
  source 1..20: mol_type = other RNA
cgtaggatttttttctttct

SEQ ID NO: 2164 - RNA, 20 nt, synthetic construct
  source 1..20: mol_type = other RNA
cgtcctgagactcccctagt

SEQ ID NO: 2165 - RNA, 20 nt, synthetic construct
  source 1..20: mol_type = other RNA
ctcagactctcttcccagga

SEQ ID NO: 2166 - RNA, 20 nt, synthetic construct
  source 1..20: mol_type = other RNA
ctctcaagtggcgggcaaac

SEQ ID NO: 2167 - RNA, 20 nt, synthetic construct
  source 1..20: mol_type = other RNA
ctctgctgattcttttgtga

SEQ ID NO: 2168 - RNA, 20 nt, synthetic construct
  source 1..20: mol_type = other RNA
ctctgttgttctggtgcctg

SEQ ID NO: 2169 - RNA, 20 nt, synthetic construct
  source 1..20: mol_type = other RNA
ctgatggaggagggtgagac

SEQ ID NO: 2170 - RNA, 20 nt, synthetic construct
  source 1..20: mol_type = other RNA
cttaaacttgggcacaagta

SEQ ID NO: 2171 - RNA, 20 nt, synthetic construct
  source 1..20: mol_type = other RNA
cttaagggtgagagggaagc

SEQ ID NO: 2172 - RNA, 20 nt, synthetic construct
  source 1..20: mol_type = other RNA
cttacgcacagttggaaaat

SEQ ID NO: 2173 - RNA, 20 nt, synthetic construct
  source 1..20: mol_type = other RNA
cttatttgaaaggccgaaac

SEQ ID NO: 2174 - RNA, 20 nt, synthetic construct
  source 1..20: mol_type = other RNA
ctttgtcctcaagagtagga

SEQ ID NO: 2175 - RNA, 20 nt, synthetic construct
  source 1..20: mol_type = other RNA
gaaatcggtctgtgggctag

SEQ ID NO: 2176 - RNA, 20 nt, synthetic construct
  source 1..20: mol_type = other RNA
gactggaggcaggctgaatc

SEQ ID NO: 2177 - RNA, 20 nt, synthetic construct
  source 1..20: mol_type = other RNA
gagaatccaaagcaggctcc

SEQ ID NO: 2178 - RNA, 20 nt, synthetic construct
  source 1..20: mol_type = other RNA
gagagcagatggagggacag

SEQ ID NO: 2179 - RNA, 20 nt, synthetic construct
  source 1..20: mol_type = other RNA
gagagtgcacacaagtggga

SEQ ID NO: 2180 - RNA, 20 nt, synthetic construct
  source 1..20: mol_type = other RNA
gagatcctgggacatggcaa

SEQ ID NO: 2181 - RNA, 20 nt, synthetic construct
  source 1..20: mol_type = other RNA
gagcggaatcactggggatg

SEQ ID NO: 2182 - RNA, 20 nt, synthetic construct
  source 1..20: mol_type = other RNA
gaggaggccaacctttctgc

SEQ ID NO: 2183 - RNA, 20 nt, synthetic construct
  source 1..20: mol_type = other RNA
gagtatcgcatttgggaacc

SEQ ID NO: 2184 - RNA, 20 nt, synthetic construct
  source 1..20: mol_type = other RNA
gatagcgctgccatgcgctc

SEQ ID NO: 2185 - RNA, 20 nt, synthetic construct
  source 1..20: mol_type = other RNA
gatggtgtccacccattctc

SEQ ID NO: 2186 - RNA, 20 nt, synthetic construct
  source 1..20: mol_type = other RNA
gcagtcaggggctacatggc

SEQ ID NO: 2187 - RNA, 20 nt, synthetic construct
  source 1..20: mol_type = other RNA
gctacgtgcagctgcacccc

SEQ ID NO: 2188 - RNA, 20 nt, synthetic construct
  source 1..20: mol_type = other RNA
ggaagcgtgggaggcctggc

SEQ ID NO: 2189 - RNA, 20 nt, synthetic construct
  source 1..20: mol_type = other RNA
ggagctacttggagtcaaga

SEQ ID NO: 2190 - RNA, 20 nt, synthetic construct
  source 1..20: mol_type = other RNA
gggaaggagtagcaggaaac

SEQ ID NO: 2191 - RNA, 20 nt, synthetic construct
  source 1..20: mol_type = other RNA
gggagccacccacatgtgcc

SEQ ID NO: 2192 - RNA, 20 nt, synthetic construct
  source 1..20: mol_type = other RNA
gggattaagtttactgatgg

SEQ ID NO: 2193 - RNA, 20 nt, synthetic construct
  source 1..20: mol_type = other RNA
gggggtgtgggctgggctta

SEQ ID NO: 2194 - RNA, 20 nt, synthetic construct
  source 1..20: mol_type = other RNA
ggtagtggtgcttatttgaa

SEQ ID NO: 2195 - RNA, 20 nt, synthetic construct
  source 1..20: mol_type = other RNA
ggtgcccggaggcaccggtc

SEQ ID NO: 2196 - RNA, 20 nt, synthetic construct
  source 1..20: mol_type = other RNA
ggtgtcagaattgcaggagt

SEQ ID NO: 2197 - RNA, 20 nt, synthetic construct
  source 1..20: mol_type = other RNA
gtaggattttagccttccac

SEQ ID NO: 2198 - RNA, 20 nt, synthetic construct
  source 1..20: mol_type = other RNA
gtgagttcgagcggggcatc

SEQ ID NO: 2199 - RNA, 20 nt, synthetic construct
  source 1..20: mol_type = other RNA
gtggaggaatattgaaacta

SEQ ID NO: 2200 - RNA, 20 nt, synthetic construct
  source 1..20: mol_type = other RNA
gtgggctagaggttcttgct

SEQ ID NO: 2201 - RNA, 20 nt, synthetic construct
  source 1..20: mol_type = other RNA
gttcggggtgtcagaattgc

SEQ ID NO: 2202 - RNA, 20 nt, synthetic construct
  source 1..20: mol_type = other RNA
taaggtgttcaagaggcttg

SEQ ID NO: 2203 - RNA, 20 nt, synthetic construct
  source 1..20: mol_type = other RNA
tagaaagcgtgttgactcgt

SEQ ID NO: 2204 - RNA, 20 nt, synthetic construct
  source 1..20: mol_type = other RNA
tagagcgttaccagcccttg

SEQ ID NO: 2205 - RNA, 20 nt, synthetic construct
  source 1..20: mol_type = other RNA
taggtgactgacttcagctc

SEQ ID NO: 2206 - RNA, 20 nt, synthetic construct
  source 1..20: mol_type = other RNA
tagtcgtagaatggagggag

SEQ ID NO: 2207 - RNA, 20 nt, synthetic construct
  source 1..20: mol_type = other RNA
tcattagttgtgcacacaat

SEQ ID NO: 2208 - RNA, 20 nt, synthetic construct
  source 1..20: mol_type = other RNA
tccacagactgcagcagtta

SEQ ID NO: 2209 - RNA, 20 nt, synthetic construct
  source 1..20: mol_type = other RNA
tcccatggtgatctccaaac

SEQ ID NO: 2210 - RNA, 20 nt, synthetic construct
  source 1..20: mol_type = other RNA
tcctgggacatggcaaaggg

SEQ ID NO: 2211 - RNA, 20 nt, synthetic construct
  source 1..20: mol_type = other RNA
tctggtgcctgaggccctcg

SEQ ID NO: 2212 - RNA, 20 nt, synthetic construct
  source 1..20: mol_type = other RNA
tcttaacagcccaagggttg

SEQ ID NO: 2213 - RNA, 20 nt, synthetic construct
  source 1..20: mol_type = other RNA
tctttggtagatgtcttctg

SEQ ID NO: 2214 - RNA, 20 nt, synthetic construct
  source 1..20: mol_type = other RNA
tgacagatgagtctcaggtg

SEQ ID NO: 2215 - RNA, 20 nt, synthetic construct
  source 1..20: mol_type = other RNA
tgccctcagactctcttccc

SEQ ID NO: 2216 - RNA, 20 nt, synthetic construct
  source 1..20: mol_type = other RNA
tggagaacggactcttatcc

SEQ ID NO: 2217 - RNA, 20 nt, synthetic construct
  source 1..20: mol_type = other RNA
tggcaatttaagggtgactc

SEQ ID NO: 2218 - RNA, 20 nt, synthetic construct
  source 1..20: mol_type = other RNA
tgtgccaggtccctgcccac

SEQ ID NO: 2219 - RNA, 20 nt, synthetic construct
  source 1..20: mol_type = other RNA
tgtttttagtcgtagaatgg

SEQ ID NO: 2220 - RNA, 20 nt, synthetic construct
  source 1..20: mol_type = other RNA
ttcagactccctcctggcac

SEQ ID NO: 2221 - RNA, 20 nt, synthetic construct
  source 1..20: mol_type = other RNA
ttcccactcttaacagccca

SEQ ID NO: 2222 - RNA, 20 nt, synthetic construct
  source 1..20: mol_type = other RNA
ttctagcagctgacacgatg

SEQ ID NO: 2223 - RNA, 20 nt, synthetic construct
  source 1..20: mol_type = other RNA
ttctgtgcgggaagcgtggg

SEQ ID NO: 2224 - RNA, 20 nt, synthetic construct
  source 1..20: mol_type = other RNA
ttgcatgactacgggcaccc

SEQ ID NO: 2225 - RNA, 20 nt, synthetic construct
  source 1..20: mol_type = other RNA
ttggagtcaagaaggtgccc

SEQ ID NO: 2226 - RNA, 20 nt, synthetic construct
  source 1..20: mol_type = other RNA
ttgggaaccaggatagtttg

SEQ ID NO: 2227 - RNA, 20 nt, synthetic construct
  source 1..20: mol_type = other RNA
ttggtagatgtcttctgagg

SEQ ID NO: 2228 - RNA, 20 nt, synthetic construct
  source 1..20: mol_type = other RNA
tttaaccgactgagccaccc

SEQ ID NO: 2229 - RNA, 20 nt, synthetic construct
  source 1..20: mol_type = other RNA
tttacttccttaagggtgag

SEQ ID NO: 2230 - RNA, 20 nt, synthetic construct
  source 1..20: mol_type = other RNA
tttgaaaggccgaaacaggc

SEQ ID NO: 2231 - RNA, 20 nt, synthetic construct
  source 1..20: mol_type = other RNA
aacaggcaggctggggtgcc

SEQ ID NO: 2232 - RNA, 20 nt, synthetic construct
  source 1..20: mol_type = other RNA
caggattgctacgtggagaa

SEQ ID NO: 2233 - RNA, 20 nt, synthetic construct
  source 1..20: mol_type = other RNA
catcctggtctgactgatcg

SEQ ID NO: 2234 - RNA, 20 nt, synthetic construct
  source 1..20: mol_type = other RNA
ccccgtgtctgtgttctgtg

SEQ ID NO: 2235 - RNA, 20 nt, synthetic construct
  source 1..20: mol_type = other RNA
ctagaggttcttgctaggga

SEQ ID NO: 2236 - RNA, 20 nt, synthetic construct
  source 1..20: mol_type = other RNA
ctgttcttgggttctgccag

SEQ ID NO: 2237 - RNA, 20 nt, synthetic construct
  source 1..20: mol_type = other RNA
gaatcaggagcacatgtgag

SEQ ID NO: 2238 - RNA, 20 nt, synthetic construct
  source 1..20: mol_type = other RNA
gatttttttctttctaggtt

SEQ ID NO: 2239 - RNA, 20 nt, synthetic construct
  source 1..20: mol_type = other RNA
gcaccggtcaggggtctctc

SEQ ID NO: 2240 - RNA, 20 nt, synthetic construct
  source 1..20: mol_type = other RNA
gcggccctctctccagaaat

SEQ ID NO: 2241 - RNA, 20 nt, synthetic construct
  source 1..20: mol_type = other RNA
gctggggtgcccggaggcac

SEQ ID NO: 2242 - RNA, 20 nt, synthetic construct
  source 1..20: mol_type = other RNA
ggaaaataggggactaatat

SEQ ID NO: 2243 - RNA, 20 nt, synthetic construct
  source 1..20: mol_type = other RNA
ggttcttgctagggacggag

SEQ ID NO: 2244 - RNA, 20 nt, synthetic construct
  source 1..20: mol_type = other RNA
gttctagccacaaagttaag

SEQ ID NO: 2245 - RNA, 20 nt, synthetic construct
  source 1..20: mol_type = other RNA
taactgcatcttagcacccc

SEQ ID NO: 2246 - RNA, 20 nt, synthetic construct
  source 1..20: mol_type = other RNA
tcaaggtttgtgagttcgag

SEQ ID NO: 2247 - RNA, 20 nt, synthetic construct
  source 1..20: mol_type = other RNA
tggaatttcttgcatgacta

SEQ ID NO: 2248 - RNA, 20 nt, synthetic construct
  source 1..20: mol_type = other RNA
tggcacaggtgcgtgggtga

SEQ ID NO: 2249 - RNA, 20 nt, synthetic construct
  source 1..20: mol_type = other RNA
tgggagtgggcaggtctctg

SEQ ID NO: 2250 - RNA, 20 nt, synthetic construct
  source 1..20: mol_type = other RNA
tgtcagtgcagagcctgaca

SEQ ID NO: 2251 - RNA, 20 nt, synthetic construct
  source 1..20: mol_type = other RNA
tgtgagttgctctcaagtgg

SEQ ID NO: 2252 - RNA, 20 nt, synthetic construct
  source 1..20: mol_type = other RNA
ttttctgtttgtgtcttcag

SEQ ID NO: 2253 - RNA, 20 nt, synthetic construct
  source 1..20: mol_type = other RNA
tttttatgacgtcttttttg

SEQ ID NO: 2254 - RNA, 20 nt, synthetic construct
  source 1..20: mol_type = other RNA
aactgcatcttagcaccccc

SEQ ID NO: 2255 - RNA, 20 nt, synthetic construct
  source 1..20: mol_type = other RNA
aaggccgaaacaggcaggct

SEQ ID NO: 2256 - RNA, 20 nt, synthetic construct
  source 1..20: mol_type = other RNA
aaggtttgtgagttcgagcg

SEQ ID NO: 2257 - RNA, 20 nt, synthetic construct
  source 1..20: mol_type = other RNA
aataggggagagttagttgg

SEQ ID NO: 2258 - RNA, 20 nt, synthetic construct
  source 1..20: mol_type = other RNA
acaataggggagagttagtt

SEQ ID NO: 2259 - RNA, 20 nt, synthetic construct
  source 1..20: mol_type = other RNA
acaggcctttggagcttctg

SEQ ID NO: 2260 - RNA, 20 nt, synthetic construct
  source 1..20: mol_type = other RNA
acaggtgcgtgggtgacggg

SEQ ID NO: 2261 - RNA, 20 nt, synthetic construct
  source 1..20: mol_type = other RNA
acatacagaccatgcagtca

SEQ ID NO: 2262 - RNA, 20 nt, synthetic construct
  source 1..20: mol_type = other RNA
actcaggtgatgacctgagt

SEQ ID NO: 2263 - RNA, 20 nt, synthetic construct
  source 1..20: mol_type = other RNA
agaaaatgttccgtctgtct

SEQ ID NO: 2264 - RNA, 20 nt, synthetic construct
  source 1..20: mol_type = other RNA
agagtgcacacaagtgggaa

SEQ ID NO: 2265 - RNA, 20 nt, synthetic construct
  source 1..20: mol_type = other RNA
agatcctgggacatggcaaa

SEQ ID NO: 2266 - RNA, 20 nt, synthetic construct
  source 1..20: mol_type = other RNA
agcagctgacacgatgaggg

SEQ ID NO: 2267 - RNA, 20 nt, synthetic construct
  source 1..20: mol_type = other RNA
aggccgaaacaggcaggctg

SEQ ID NO: 2268 - RNA, 20 nt, synthetic construct
  source 1..20: mol_type = other RNA
aggcctttggagcttctggg

SEQ ID NO: 2269 - RNA, 20 nt, synthetic construct
  source 1..20: mol_type = other RNA
agggacggagcggaatcact

SEQ ID NO: 2270 - RNA, 20 nt, synthetic construct
  source 1..20: mol_type = other RNA
aggtgcgtgggtgacggggg

SEQ ID NO: 2271 - RNA, 20 nt, synthetic construct
  source 1..20: mol_type = other RNA
agtaagtccaacctcctctt

SEQ ID NO: 2272 - RNA, 20 nt, synthetic construct
  source 1..20: mol_type = other RNA
atctcaagctgaacactttg

SEQ ID NO: 2273 - RNA, 20 nt, synthetic construct
  source 1..20: mol_type = other RNA
atgaggcatgaggtgatcct

SEQ ID NO: 2274 - RNA, 20 nt, synthetic construct
  source 1..20: mol_type = other RNA
atggtgtccacccattctca

SEQ ID NO: 2275 - RNA, 20 nt, synthetic construct
  source 1..20: mol_type = other RNA
atgtaagcagtcctgggagt

SEQ ID NO: 2276 - RNA, 20 nt, synthetic construct
  source 1..20: mol_type = other RNA
atgtcaccctggcaatttaa

SEQ ID NO: 2277 - RNA, 20 nt, synthetic construct
  source 1..20: mol_type = other RNA
atgtgctcattgagagcatg

SEQ ID NO: 2278 - RNA, 20 nt, synthetic construct
  source 1..20: mol_type = other RNA
attagttgtgcacacaatag

SEQ ID NO: 2279 - RNA, 20 nt, synthetic construct
  source 1..20: mol_type = other RNA
attcactaatgtttctggat

SEQ ID NO: 2280 - RNA, 20 nt, synthetic construct
  source 1..20: mol_type = other RNA
attctctcatctgcaaaatg

SEQ ID NO: 2281 - RNA, 20 nt, synthetic construct
  source 1..20: mol_type = other RNA
atttttttctttctaggttc

SEQ ID NO: 2282 - RNA, 20 nt, synthetic construct
  source 1..20: mol_type = other RNA
caagagctgggcgtcaagat

SEQ ID NO: 2283 - RNA, 20 nt, synthetic construct
  source 1..20: mol_type = other RNA
caaggtttgtgagttcgagc

SEQ ID NO: 2284 - RNA, 20 nt, synthetic construct
  source 1..20: mol_type = other RNA
caataggggagagttagttg

SEQ ID NO: 2285 - RNA, 20 nt, synthetic construct
  source 1..20: mol_type = other RNA
cacaaagttaagcggcagct

SEQ ID NO: 2286 - RNA, 20 nt, synthetic construct
  source 1..20: mol_type = other RNA
cacaggcctttggagcttct

SEQ ID NO: 2287 - RNA, 20 nt, synthetic construct
  source 1..20: mol_type = other RNA
cacaggtgcgtgggtgacgg

SEQ ID NO: 2288 - RNA, 20 nt, synthetic construct
  source 1..20: mol_type = other RNA
caggcctttggagcttctgg

SEQ ID NO: 2289 - RNA, 20 nt, synthetic construct
  source 1..20: mol_type = other RNA
caggggtgacagttggagct

SEQ ID NO: 2290 - RNA, 20 nt, synthetic construct
  source 1..20: mol_type = other RNA
caggtgcgtgggtgacgggg

SEQ ID NO: 2291 - RNA, 20 nt, synthetic construct
  source 1..20: mol_type = other RNA
catacagaccatgcagtcag

SEQ ID NO: 2292 - RNA, 20 nt, synthetic construct
  source 1..20: mol_type = other RNA
catgtgctcattgagagcat

SEQ ID NO: 2293 - RNA, 20 nt, synthetic construct
  source 1..20: mol_type = other RNA
cattagttgtgcacacaata

SEQ ID NO: 2294 - RNA, 20 nt, synthetic construct
  source 1..20: mol_type = other RNA
ccaggcatttacttccttaa

SEQ ID NO: 2295 - RNA, 20 nt, synthetic construct
  source 1..20: mol_type = other RNA
cccgtgtctgtgttctgtgc

SEQ ID NO: 2296 - RNA, 20 nt, synthetic construct
  source 1..20: mol_type = other RNA
ccctcctggcacaggtgcgt

SEQ ID NO: 2297 - RNA, 20 nt, synthetic construct
  source 1..20: mol_type = other RNA
ccttaaatgtcatcctggca

SEQ ID NO: 2298 - RNA, 20 nt, synthetic construct
  source 1..20: mol_type = other RNA
cctttggagcttctgggggg

SEQ ID NO: 2299 - RNA, 20 nt, synthetic construct
  source 1..20: mol_type = other RNA
ctacgtgcagctgcacccca

SEQ ID NO: 2300 - RNA, 20 nt, synthetic construct
  source 1..20: mol_type = other RNA
ctagcagctgacacgatgag

SEQ ID NO: 2301 - RNA, 20 nt, synthetic construct
  source 1..20: mol_type = other RNA
ctctccagaaatcggtctgt

SEQ ID NO: 2302 - RNA, 20 nt, synthetic construct
  source 1..20: mol_type = other RNA
cttaaatgtcatcctggcag

SEQ ID NO: 2303 - RNA, 20 nt, synthetic construct
  source 1..20: mol_type = other RNA
cttaacagcccaagggttga

SEQ ID NO: 2304 - RNA, 20 nt, synthetic construct
  source 1..20: mol_type = other RNA
cttccttctgtatcaattca

SEQ ID NO: 2305 - RNA, 20 nt, synthetic construct
  source 1..20: mol_type = other RNA
cttgggagagtatcgcattt

SEQ ID NO: 2306 - RNA, 20 nt, synthetic construct
  source 1..20: mol_type = other RNA
ctttggagcttctggggggg

SEQ ID NO: 2307 - RNA, 20 nt, synthetic construct
  source 1..20: mol_type = other RNA
gaaggagtagcaggaaacag

SEQ ID NO: 2308 - RNA, 20 nt, synthetic construct
  source 1..20: mol_type = other RNA
gacagatgagtctcaggtga

SEQ ID NO: 2309 - RNA, 20 nt, synthetic construct
  source 1..20: mol_type = other RNA
gagagagagtgcacacaagt

SEQ ID NO: 2310 - RNA, 20 nt, synthetic construct
  source 1..20: mol_type = other RNA
gaggcatgaggtgatcctgg

SEQ ID NO: 2311 - RNA, 20 nt, synthetic construct
  source 1..20: mol_type = other RNA
gaggcctggcaggagatcct

SEQ ID NO: 2312 - RNA, 20 nt, synthetic construct
  source 1..20: mol_type = other RNA
gatctcaagctgaacacttt

SEQ ID NO: 2313 - RNA, 20 nt, synthetic construct
  source 1..20: mol_type = other RNA
gatgggtgagagcagatgga

SEQ ID NO: 2314 - RNA, 20 nt, synthetic construct
  source 1..20: mol_type = other RNA
gatttttatctctttgtctt

SEQ ID NO: 2315 - RNA, 20 nt, synthetic construct
  source 1..20: mol_type = other RNA
gcacaggtgcgtgggtgacg

SEQ ID NO: 2316 - RNA, 20 nt, synthetic construct
  source 1..20: mol_type = other RNA
gccatcaacgaatattgcat

SEQ ID NO: 2317 - RNA, 20 nt, synthetic construct
  source 1..20: mol_type = other RNA
gcctttggagcttctggggg

SEQ ID NO: 2318 - RNA, 20 nt, synthetic construct
  source 1..20: mol_type = other RNA
gcttctgggggggggggtgt

SEQ ID NO: 2319 - RNA, 20 nt, synthetic construct
  source 1..20: mol_type = other RNA
ggaaggagtagcaggaaaca

SEQ ID NO: 2320 - RNA, 20 nt, synthetic construct
  source 1..20: mol_type = other RNA
ggaagggactccctggcttt

SEQ ID NO: 2321 - RNA, 20 nt, synthetic construct
  source 1..20: mol_type = other RNA
ggaatttcttgcatgactac

SEQ ID NO: 2322 - RNA, 20 nt, synthetic construct
  source 1..20: mol_type = other RNA
ggagaacggactcttatcca

SEQ ID NO: 2323 - RNA, 20 nt, synthetic construct
  source 1..20: mol_type = other RNA
ggcacaggtgcgtgggtgac

SEQ ID NO: 2324 - RNA, 20 nt, synthetic construct
  source 1..20: mol_type = other RNA
ggcctttggagcttctgggg

SEQ ID NO: 2325 - RNA, 20 nt, synthetic construct
  source 1..20: mol_type = other RNA
gggacggagcggaatcactg

SEQ ID NO: 2326 - RNA, 20 nt, synthetic construct
  source 1..20: mol_type = other RNA
gggagaggtttggagatgga

SEQ ID NO: 2327 - RNA, 20 nt, synthetic construct
  source 1..20: mol_type = other RNA
ggtgcgtgggtgacgggggg

SEQ ID NO: 2328 - RNA, 20 nt, synthetic construct
  source 1..20: mol_type = other RNA
gtcagtgcagagcctgacac

SEQ ID NO: 2329 - RNA, 20 nt, synthetic construct
  source 1..20: mol_type = other RNA
gtcctgagactcccctagta

SEQ ID NO: 2330 - RNA, 20 nt, synthetic construct
  source 1..20: mol_type = other RNA
gtgagttgctctcaagtggc

SEQ ID NO: 2331 - RNA, 20 nt, synthetic construct
  source 1..20: mol_type = other RNA
gtgcccggaggcaccggtca

SEQ ID NO: 2332 - RNA, 20 nt, synthetic construct
  source 1..20: mol_type = other RNA
gtgcgtgggtgacggggggg

SEQ ID NO: 2333 - RNA, 20 nt, synthetic construct
  source 1..20: mol_type = other RNA
gtgttcaagaggcttgaggt

SEQ ID NO: 2334 - RNA, 20 nt, synthetic construct
  source 1..20: mol_type = other RNA
gtgttctgtgcgggaagcgt

SEQ ID NO: 2335 - RNA, 20 nt, synthetic construct
  source 1..20: mol_type = other RNA
gtttttagtcgtagaatgga

SEQ ID NO: 2336 - RNA, 20 nt, synthetic construct
  source 1..20: mol_type = other RNA
tacatttaattgtatacttt

SEQ ID NO: 2337 - RNA, 20 nt, synthetic construct
  source 1..20: mol_type = other RNA
tacgcacagttggaaaatag

SEQ ID NO: 2338 - RNA, 20 nt, synthetic construct
  source 1..20: mol_type = other RNA
tacgggcacccagggcacat

SEQ ID NO: 2339 - RNA, 20 nt, synthetic construct
  source 1..20: mol_type = other RNA
tagcagctgacacgatgagg

SEQ ID NO: 2340 - RNA, 20 nt, synthetic construct
  source 1..20: mol_type = other RNA
tatctccaggacttaaactt

SEQ ID NO: 2341 - RNA, 20 nt, synthetic construct
  source 1..20: mol_type = other RNA
tattctctcatctgcaaaat

SEQ ID NO: 2342 - RNA, 20 nt, synthetic construct
  source 1..20: mol_type = other RNA
tcagactctcttcccaggaa

SEQ ID NO: 2343 - RNA, 20 nt, synthetic construct
  source 1..20: mol_type = other RNA
tcagttccactgctgttctt

SEQ ID NO: 2344 - RNA, 20 nt, synthetic construct
  source 1..20: mol_type = other RNA
tcatcctggcaggggcgcct

SEQ ID NO: 2345 - RNA, 20 nt, synthetic construct
  source 1..20: mol_type = other RNA
tcccactcttaacagcccaa

SEQ ID NO: 2346 - RNA, 20 nt, synthetic construct
  source 1..20: mol_type = other RNA
tctagcagctgacacgatga

SEQ ID NO: 2347 - RNA, 20 nt, synthetic construct
  source 1..20: mol_type = other RNA
tctgggatgtaagcagtcct

SEQ ID NO: 2348 - RNA, 20 nt, synthetic construct
  source 1..20: mol_type = other RNA
tgagcggtttcctcttcctt

SEQ ID NO: 2349 - RNA, 20 nt, synthetic construct
  source 1..20: mol_type = other RNA
tgaggcatgaggtgatcctg

SEQ ID NO: 2350 - RNA, 20 nt, synthetic construct
  source 1..20: mol_type = other RNA
tgatggaggagggtgagaca

SEQ ID NO: 2351 - RNA, 20 nt, synthetic construct
  source 1..20: mol_type = other RNA
tgcatgactacgggcaccca

SEQ ID NO: 2352 - RNA, 20 nt, synthetic construct
  source 1..20: mol_type = other RNA
tgcccggaggcaccggtcag

SEQ ID NO: 2353 - RNA, 20 nt, synthetic construct
  source 1..20: mol_type = other RNA
tgggaaccaggatagtttga

SEQ ID NO: 2354 - RNA, 20 nt, synthetic construct
  source 1..20: mol_type = other RNA
tgggctagaggttcttgcta

SEQ ID NO: 2355 - RNA, 20 nt, synthetic construct
  source 1..20: mol_type = other RNA
tgggggggggggtgtgggct

SEQ ID NO: 2356 - RNA, 20 nt, synthetic construct
  source 1..20: mol_type = other RNA
ttaagtttactgatggagga

SEQ ID NO: 2357 - RNA, 20 nt, synthetic construct
  source 1..20: mol_type = other RNA
ttacgcacagttggaaaata

SEQ ID NO: 2358 - RNA, 20 nt, synthetic construct
  source 1..20: mol_type = other RNA
ttacttccttaagggtgaga

SEQ ID NO: 2359 - RNA, 20 nt, synthetic construct
  source 1..20: mol_type = other RNA
ttgctggtgacccaagagct

SEQ ID NO: 2360 - RNA, 20 nt, synthetic construct
  source 1..20: mol_type = other RNA
ttgtttcagatttggccact

SEQ ID NO: 2361 - RNA, 20 nt, synthetic construct
  source 1..20: mol_type = other RNA
tttggagcttctgggggggg

SEQ ID NO: 2362 - RNA, 20 nt, synthetic construct
  source 1..20: mol_type = other RNA
tttgtcctcaagagtaggaa

SEQ ID NO: 2363 - RNA, 20 nt, synthetic construct
  source 1..20: mol_type = other RNA
tttttttctttctaggttcg

SEQ ID NO: 2364 - RNA, 20 nt, synthetic construct
  source 1..20: mol_type = other RNA
aaaaatccaggattgctacg

SEQ ID NO: 2365 - RNA, 20 nt, synthetic construct
  source 1..20: mol_type = other RNA
aaaggccgaaacaggcaggc

SEQ ID NO: 2366 - RNA, 20 nt, synthetic construct
  source 1..20: mol_type = other RNA
aaatcctctccgtgtctcag

SEQ ID NO: 2367 - RNA, 20 nt, synthetic construct
  source 1..20: mol_type = other RNA
acagagcagttggctcagca

SEQ ID NO: 2368 - RNA, 20 nt, synthetic construct
  source 1..20: mol_type = other RNA
acaggggtgacagttggagc

SEQ ID NO: 2369 - RNA, 20 nt, synthetic construct
  source 1..20: mol_type = other RNA
acatgtgctcattgagagca

SEQ ID NO: 2370 - RNA, 20 nt, synthetic construct
  source 1..20: mol_type = other RNA
acgtagcatatttccaactc

SEQ ID NO: 2371 - RNA, 20 nt, synthetic construct
  source 1..20: mol_type = other RNA
actgcttgtgctggcattgc

SEQ ID NO: 2372 - RNA, 20 nt, synthetic construct
  source 1..20: mol_type = other RNA
agagagagagtgcacacaag

SEQ ID NO: 2373 - RNA, 20 nt, synthetic construct
  source 1..20: mol_type = other RNA
agatctcaagctgaacactt

SEQ ID NO: 2374 - RNA, 20 nt, synthetic construct
  source 1..20: mol_type = other RNA
agccatcaacgaatattgca

SEQ ID NO: 2375 - RNA, 20 nt, synthetic construct
  source 1..20: mol_type = other RNA
agctgggacaacagagcagt

SEQ ID NO: 2376 - RNA, 20 nt, synthetic construct
  source 1..20: mol_type = other RNA
agcttctgggggggggggtg

SEQ ID NO: 2377 - RNA, 20 nt, synthetic construct
  source 1..20: mol_type = other RNA
aggaagggactccctggctt

SEQ ID NO: 2378 - RNA, 20 nt, synthetic construct
  source 1..20: mol_type = other RNA
aggagccttgtcagttctgg

SEQ ID NO: 2379 - RNA, 20 nt, synthetic construct
  source 1..20: mol_type = other RNA
agggctggtcagtgtatttc

SEQ ID NO: 2380 - RNA, 20 nt, synthetic construct
  source 1..20: mol_type = other RNA
agtgatttgtagcccaagga

SEQ ID NO: 2381 - RNA, 20 nt, synthetic construct
  source 1..20: mol_type = other RNA
atacatttaattgtatactt

SEQ ID NO: 2382 - RNA, 20 nt, synthetic construct
  source 1..20: mol_type = other RNA
ataggggactaatatcggtg

SEQ ID NO: 2383 - RNA, 20 nt, synthetic construct
  source 1..20: mol_type = other RNA
atatgtgagttgctctcaag

SEQ ID NO: 2384 - RNA, 20 nt, synthetic construct
  source 1..20: mol_type = other RNA
atcatgacctgagccgaagt

SEQ ID NO: 2385 - RNA, 20 nt, synthetic construct
  source 1..20: mol_type = other RNA
atgagagctttgtgaagaag

SEQ ID NO: 2386 - RNA, 20 nt, synthetic construct
  source 1..20: mol_type = other RNA
atgaggtgatcctgggggaa

SEQ ID NO: 2387 - RNA, 20 nt, synthetic construct
  source 1..20: mol_type = other RNA
attgctggtgacccaagagc

SEQ ID NO: 2388 - RNA, 20 nt, synthetic construct
  source 1..20: mol_type = other RNA
attgtttcagatttggccac

SEQ ID NO: 2389 - RNA, 20 nt, synthetic construct
  source 1..20: mol_type = other RNA
caactattcactaatgtttc

SEQ ID NO: 2390 - RNA, 20 nt, synthetic construct
  source 1..20: mol_type = other RNA
caatggaaatgaattactgt

SEQ ID NO: 2391 - RNA, 20 nt, synthetic construct
  source 1..20: mol_type = other RNA
cacaataggggagagttagt

SEQ ID NO: 2392 - RNA, 20 nt, synthetic construct
  source 1..20: mol_type = other RNA
caggaaacaggggtgacagt

SEQ ID NO: 2393 - RNA, 20 nt, synthetic construct
  source 1..20: mol_type = other RNA
caggtgagggagacatcgca

SEQ ID NO: 2394 - RNA, 20 nt, synthetic construct
  source 1..20: mol_type = other RNA
catcacctccagttggtctt

SEQ ID NO: 2395 - RNA, 20 nt, synthetic construct
  source 1..20: mol_type = other RNA
ccaagagctgggcgtcaaga

SEQ ID NO: 2396 - RNA, 20 nt, synthetic construct
  source 1..20: mol_type = other RNA
ccacaaagttaagcggcagc

SEQ ID NO: 2397 - RNA, 20 nt, synthetic construct
  source 1..20: mol_type = other RNA
ccacaggcctttggagcttc

SEQ ID NO: 2398 - RNA, 20 nt, synthetic construct
  source 1..20: mol_type = other RNA
ccatgcagtcaggggctaca

SEQ ID NO: 2399 - RNA, 20 nt, synthetic construct
  source 1..20: mol_type = other RNA
cccaccattttctgcttctt

SEQ ID NO: 2400 - RNA, 20 nt, synthetic construct
  source 1..20: mol_type = other RNA
ccctggctttgggaagcttc

SEQ ID NO: 2401 - RNA, 20 nt, synthetic construct
  source 1..20: mol_type = other RNA
cctcttcttgcctccctcac

SEQ ID NO: 2402 - RNA, 20 nt, synthetic construct
  source 1..20: mol_type = other RNA
cgaattaccttacgcacagt

SEQ ID NO: 2403 - RNA, 20 nt, synthetic construct
  source 1..20: mol_type = other RNA
ctacgggcacccagggcaca

SEQ ID NO: 2404 - RNA, 20 nt, synthetic construct
  source 1..20: mol_type = other RNA
ctattctctcatctgcaaaa

SEQ ID NO: 2405 - RNA, 20 nt, synthetic construct
  source 1..20: mol_type = other RNA
ctcagttccactgctgttct

SEQ ID NO: 2406 - RNA, 20 nt, synthetic construct
  source 1..20: mol_type = other RNA
ctcatgcctgaatcctgctt

SEQ ID NO: 2407 - RNA, 20 nt, synthetic construct
  source 1..20: mol_type = other RNA
ctcattgagagcatggggac

SEQ ID NO: 2408 - RNA, 20 nt, synthetic construct
  source 1..20: mol_type = other RNA
ctcttatccagggtcttgga

SEQ ID NO: 2409 - RNA, 20 nt, synthetic construct
  source 1..20: mol_type = other RNA
ctgggggggggggtgtgggc

SEQ ID NO: 2410 - RNA, 20 nt, synthetic construct
  source 1..20: mol_type = other RNA
cttcccaggaagggactccc

SEQ ID NO: 2411 - RNA, 20 nt, synthetic construct
  source 1..20: mol_type = other RNA
cttgatggctgctattcctt

SEQ ID NO: 2412 - RNA, 20 nt, synthetic construct
  source 1..20: mol_type = other RNA
cttgggattaagtttactga

SEQ ID NO: 2413 - RNA, 20 nt, synthetic construct
  source 1..20: mol_type = other RNA
ctttggttgacctggcacct

SEQ ID NO: 2414 - RNA, 20 nt, synthetic construct
  source 1..20: mol_type = other RNA
gaaggtgagtcagaagaccc

SEQ ID NO: 2415 - RNA, 20 nt, synthetic construct
  source 1..20: mol_type = other RNA
gactcaggtgatgacctgag

SEQ ID NO: 2416 - RNA, 20 nt, synthetic construct
  source 1..20: mol_type = other RNA
gaggggggcactgcttgtgc

SEQ ID NO: 2417 - RNA, 20 nt, synthetic construct
  source 1..20: mol_type = other RNA
gatgaggcatgaggtgatcc

SEQ ID NO: 2418 - RNA, 20 nt, synthetic construct
  source 1..20: mol_type = other RNA
gatgtaagcagtcctgggag

SEQ ID NO: 2419 - RNA, 20 nt, synthetic construct
  source 1..20: mol_type = other RNA
gattttccactctgttgttc

SEQ ID NO: 2420 - RNA, 20 nt, synthetic construct
  source 1..20: mol_type = other RNA
gattttttgtctacctgtag

SEQ ID NO: 2421 - RNA, 20 nt, synthetic construct
  source 1..20: mol_type = other RNA
ggagagttagttgggggtag

SEQ ID NO: 2422 - RNA, 20 nt, synthetic construct
  source 1..20: mol_type = other RNA
ggaggcctggcaggagatcc

SEQ ID NO: 2423 - RNA, 20 nt, synthetic construct
  source 1..20: mol_type = other RNA
gggccaaacctggagctact

SEQ ID NO: 2424 - RNA, 20 nt, synthetic construct
  source 1..20: mol_type = other RNA
ggggggggccgtctccatcc

SEQ ID NO: 2425 - RNA, 20 nt, synthetic construct
  source 1..20: mol_type = other RNA
gggtgagacagggccaaacc

SEQ ID NO: 2426 - RNA, 20 nt, synthetic construct
  source 1..20: mol_type = other RNA
ggtccctgcccacaggcctt

SEQ ID NO: 2427 - RNA, 20 nt, synthetic construct
  source 1..20: mol_type = other RNA
ggtcttggatggactagtca

SEQ ID NO: 2428 - RNA, 20 nt, synthetic construct
  source 1..20: mol_type = other RNA
ggtgttcaagaggcttgagg

SEQ ID NO: 2429 - RNA, 20 nt, synthetic construct
  source 1..20: mol_type = other RNA
gtagaatggagggagaggtt

SEQ ID NO: 2430 - RNA, 20 nt, synthetic construct
  source 1..20: mol_type = other RNA
gtcatcctggcaggggcgcc

SEQ ID NO: 2431 - RNA, 20 nt, synthetic construct
  source 1..20: mol_type = other RNA
gtctgggatgtaagcagtcc

SEQ ID NO: 2432 - RNA, 20 nt, synthetic construct
  source 1..20: mol_type = other RNA
gtcttttttgcggtggccaa

SEQ ID NO: 2433 - RNA, 20 nt, synthetic construct
  source 1..20: mol_type = other RNA
gtgagcggtttcctcttcct

SEQ ID NO: 2434 - RNA, 20 nt, synthetic construct
  source 1..20: mol_type = other RNA
gtgcagctgcaccccagggc

SEQ ID NO: 2435 - RNA, 20 nt, synthetic construct
  source 1..20: mol_type = other RNA
gttaaaaaaaaatgtcaccc

SEQ ID NO: 2436 - RNA, 20 nt, synthetic construct
  source 1..20: mol_type = other RNA
gtttccttcaataattttca

SEQ ID NO: 2437 - RNA, 20 nt, synthetic construct
  source 1..20: mol_type = other RNA
tagaaaatgttccgtctgtc

SEQ ID NO: 2438 - RNA, 20 nt, synthetic construct
  source 1..20: mol_type = other RNA
tagggacggagcggaatcac

SEQ ID NO: 2439 - RNA, 20 nt, synthetic construct
  source 1..20: mol_type = other RNA
tagtaagtccaacctcctct

SEQ ID NO: 2440 - RNA, 20 nt, synthetic construct
  source 1..20: mol_type = other RNA
tagtcccttaaatgtcatcc

SEQ ID NO: 2441 - RNA, 20 nt, synthetic construct
  source 1..20: mol_type = other RNA
tattcactaatgtttctgga

SEQ ID NO: 2442 - RNA, 20 nt, synthetic construct
  source 1..20: mol_type = other RNA
tcaagatgggtgagagcaga

SEQ ID NO: 2443 - RNA, 20 nt, synthetic construct
  source 1..20: mol_type = other RNA
tccccttgtgcccaccttga

SEQ ID NO: 2444 - RNA, 20 nt, synthetic construct
  source 1..20: mol_type = other RNA
tccctcctggcacaggtgcg

SEQ ID NO: 2445 - RNA, 20 nt, synthetic construct
  source 1..20: mol_type = other RNA
tcctggcaggggcgcctggg

SEQ ID NO: 2446 - RNA, 20 nt, synthetic construct
  source 1..20: mol_type = other RNA
tctcactcctttacctccca

SEQ ID NO: 2447 - RNA, 20 nt, synthetic construct
  source 1..20: mol_type = other RNA
tctctccagaaatcggtctg

SEQ ID NO: 2448 - RNA, 20 nt, synthetic construct
  source 1..20: mol_type = other RNA
tcttgggagagtatcgcatt

SEQ ID NO: 2449 - RNA, 20 nt, synthetic construct
  source 1..20: mol_type = other RNA
tgacctggcaccttggtatg

SEQ ID NO: 2450 - RNA, 20 nt, synthetic construct
  source 1..20: mol_type = other RNA
tgagagcacttaagcacctt

SEQ ID NO: 2451 - RNA, 20 nt, synthetic construct
  source 1..20: mol_type = other RNA
tgatgtttttagtcgtagaa

SEQ ID NO: 2452 - RNA, 20 nt, synthetic construct
  source 1..20: mol_type = other RNA
tgatttttatctctttgtct

SEQ ID NO: 2453 - RNA, 20 nt, synthetic construct
  source 1..20: mol_type = other RNA
tgcgggaagcgtgggaggcc

SEQ ID NO: 2454 - RNA, 20 nt, synthetic construct
  source 1..20: mol_type = other RNA
tgctcaaattgtttcagatt

SEQ ID NO: 2455 - RNA, 20 nt, synthetic construct
  source 1..20: mol_type = other RNA
tggagggagaggtttggaga

SEQ ID NO: 2456 - RNA, 20 nt, synthetic construct
  source 1..20: mol_type = other RNA
tggcaggagatcctgggaca

SEQ ID NO: 2457 - RNA, 20 nt, synthetic construct
  source 1..20: mol_type = other RNA
tggttgttcagactccctcc

SEQ ID NO: 2458 - RNA, 20 nt, synthetic construct
  source 1..20: mol_type = other RNA
tgtaggagccttgtcagttc

SEQ ID NO: 2459 - RNA, 20 nt, synthetic construct
  source 1..20: mol_type = other RNA
tgtggagctccaactcacaa

SEQ ID NO: 2460 - RNA, 20 nt, synthetic construct
  source 1..20: mol_type = other RNA
tgtgttctgtgcgggaagcg

SEQ ID NO: 2461 - RNA, 20 nt, synthetic construct
  source 1..20: mol_type = other RNA
ttaagcacctttggttgacc

SEQ ID NO: 2462 - RNA, 20 nt, synthetic construct
  source 1..20: mol_type = other RNA
ttagacacatcacctccagt

SEQ ID NO: 2463 - RNA, 20 nt, synthetic construct
  source 1..20: mol_type = other RNA
ttatctccaggacttaaact

SEQ ID NO: 2464 - RNA, 20 nt, synthetic construct
  source 1..20: mol_type = other RNA
ttatgacgtcttttttgcgg

SEQ ID NO: 2465 - RNA, 20 nt, synthetic construct
  source 1..20: mol_type = other RNA
ttgcacagttaggtcgattt

SEQ ID NO: 2466 - RNA, 20 nt, synthetic construct
  source 1..20: mol_type = other RNA
ttgggcacaagtaaggtttt

SEQ ID NO: 2467 - RNA, 20 nt, synthetic construct
  source 1..20: mol_type = other RNA
tttaaacatttatatcagta

SEQ ID NO: 2468 - RNA, 20 nt, synthetic construct
  source 1..20: mol_type = other RNA
tttgggaagcttctggtttt
